(19) United States
(12) Patent Application Publication
(10) Pub. No.: US 2022/0056444 A1
(43) Pub. Date: Feb. 24, 2022

(54) PROCESS TO INHIBIT OR ELIMINATE EOSINOPHILIC DISEASES OF THE AIRWAY AND RELATED CONDITIONS

(71) Applicant: EMPIRICO INC., San Diego, CA (US)

(72) Inventors: Omri GOTTESMAN, San Diego, CA (US); Shannon BRUSE, San Diego, CA (US); Brian CAJES, San Diego, CA (US); David LEWIS, Madison, WI (US); David ROZEMA, Cross Plains, WI (US)

(21) Appl. No.: 17/298,896

(22) PCT Filed: Dec. 3, 2019
(86) PCT No.: PCT/US2019/064286

§ 371 Date: Jun. 1, 2021

Related U.S. Application Data
(60) Provisional application No. 62/775,729, filed on Dec. 5, 2018.
(60) Provisional application No. 62/882,400, filed on Aug. 2, 2019.

(51) Int. Cl. C12N 15/113; A61K 31/713

(52) U.S. Cl. CPC C12N 15/113; A61K 31/713; C12N 2310/14; C12N 2310/315; C12N 2320/30; C12N 2310/321; C12N 2310/351; C12N 2310/11; C12N 2310/322

(57) ABSTRACT

Molecules for inhibiting arachidonate 15-lipoxygenase (ALOX-15) gene products including dsRNA (dsRNA) agents such as small interfering RNAs (siRNAs) for therapeutic use, additionally, methods to inhibit the expression of a target gene by administering these agents for the treatment of diseases involving ALOX-15 gene products.

### PRIORITY

[0001] This application claims the benefit of U.S. Provisional Application No. 62/775,729 filed Dec. 5, 2018, and U.S. Provisional Application No. 62/882,400 filed Aug. 2, 2019, the entirety of both are incorporated herein by reference.

### SEQUENCE LISTING

[0002] This application contains a Sequence Listing which has been submitted electronically in ASCII format and is hereby incorporated by reference in its entirety. Said ASCII copy, created on Nov. 22, 2019, is named 54462-708_601_SL.txt and is 1,451,425 bytes in size.

### FIELD

[0003] Provided herein are molecules for inhibition of arachidonate 15-lipoxygenase (ALOX-15) gene products, including dsRNA (dsRNA) agents such as small interfering RNAs (siRNAs) for therapeutic use. Additionally, methods of inhibiting the expression of a target gene by administering these agents, e.g., for the treatment of various diseases involving ALOX-15 gene products, are described herein.

### BACKGROUND

[0004] The newest generation of therapeutic modalities is designed to directly augment or interfere with the cellular processes that cause disease. These approaches represent a paradigm shift in our ability to directly target or mimic molecular lesions that are observed to be causal for a disease or that lead to an observable trait, either beneficial or deleterious. A preferred example of a therapeutic modality is RNA interference, or “RNAi,” in which double-stranded RNA (dsRNA, also known as interfering RNA, small interfering RNA, or siRNA) can block gene expression. Short dsRNA directs gene-specific, post-transcriptional silencing in many organisms, including vertebrates, and has provided a new tool for studying gene function. RNAi is mediated by RNA-induced silencing complex (RISC), a sequence-specific, multi-component nuclease that destroys messenger RNAs homologous to the silencing trigger. RISC is known to contain short RNAs (approximately 22 nucleotides) derived from the double-stranded RNA trigger, but the protein components of this activity remained unknown.

### SUMMARY

[0005] Stabilization of synthetic dsRNA, or siRNA, against rapid nuclease degradation is generally regarded as a prerequisite for in vivo and therapeutic applications. This can be achieved using a variety of stabilization chemistries, such as chemical modifications to the native 2′—OH group in the ribose sugar backbone, such as 2′-O-methyl (2′OMe) and 2′-Fluoro (2′F) substitutions that can be readily introduced into siRNA as 2′-modified nucleotides during RNA synthesis. Although a number of reports have demonstrated that chemically stabilized siRNA containing 2′OMe, 2′F, 2′-deoxy, or “locked nucleic acid” (LNA) modifications can be designed that retain functional RNAi activity, in some cases, such modifications may be specific to certain positional or sequence-related contexts. In some cases, the introduction of chemical modifications to native siRNA duplexes can have a negative impact on RNAi activity as noted below. As a result, the design of chemically modified siRNA has required a stochastic screening approach to identify duplexes that retain potent gene silencing activity.

[0006] An initial step in RNAi is the activation of the RISC, which requires degradation of the sense strand of the dsRNA duplex. The sense strand acts as a RISC substrate that is cleaved by the endonuclease Argonaute 2 (Ago2) in the middle of the duplex region. Immediately after the cleaved 5′-end and 3′-end fragments of the sense strand are removed from Ago2, the RISC becomes activated by the antisense strand. It has been shown that incorporation of a 2′-O-Me ribose to the Ago2 cleavage site in the sense strand can inhibit RNAi in HeLa cells. A similar effect was observed with phosphorothioate modifications, showing that cleavage of the sense strand was required for efficient RNAi also in mammals. An siRNA duplex containing modifications by 2′-OMe or various combinations of 2′-F, 2′-OMe and phosphorothioate modifications to stabilize siRNA in serum can be active. However, it may be desirable to avoid modification of the cleavage site with 2′-OMe in order to increase the stability of the siRNA.

[0007] In some aspects, provided herein is a pharmaceutical composition comprising an siRNA molecule comprising a sense strand and an antisense strand, which targets SEQ ID NO: 5357 and when administered to a patient in an effective amount reduces eosinophil count, wherein (i) the siRNA comprises a modification comprising a modified nucleoside and/or a modified internucleoside linkage, and/or (ii) the pharmaceutical composition comprises a pharmaceutically acceptable carrier; and wherein the patient comprises nasal polyposis, chronic sinusitis, allergic rhinitis, or NSAID-exacerbated respiratory disease, or a combination thereof. In some embodiments, the systemic or local eosinophil count is reduced by about 10% or more as compared to the eosinophil count prior to administration. In some aspects, provided herein is a pharmaceutical composition comprising an siRNA molecule which targets SEQ ID NO: 5357 and when administered in an effective amount to a patient comprising nasal polyps, the nasal polyps are reduced in number and/or size the patient, wherein (i) the siRNA comprises a modification comprising a modified nucleoside and/or a modified internucleoside linkage, and/or (ii) the pharmaceutical composition comprises a pharmaceutically acceptable carrier. In some embodiments, the nasal polyps are reduced in number and/or size by about 10% or more by CT scan or endoscopic assessment, as compared to the number and/or size prior to administration. In some aspects, provided herein is a pharmaceutical composition comprising an siRNA molecule which targets SEQ ID NO: 5357 and when administered to a patient in an effective amount increases nasal inspiratory peak flow in the patient, wherein (i) the siRNA comprises a modification comprising a modified nucleoside and/or a modified internucleoside linkage, and/or (ii) the pharmaceutical composition comprises a pharmaceutically acceptable carrier. In some embodiments, the nasal inspiratory peak flow is increased by about 10% or more, as compared to prior to administration. In some aspects, provided herein is a pharmaceutical composition comprising an siRNA molecule which targets SEQ ID NO: 5357 and when administered to a patient in an effective amount reduces airway symptoms in the patient, wherein the patient comprises nasal polyposis, chronic sinusitis, allergic rhinitis, or NSAID-exacerbated respiratory disease, or a combination thereof, and wherein (i) the siRNA comprises a modification comprising a modified nucleoside and/or a modified internucleoside linkage, and/or (ii) the pharmaceutical composition comprises a pharmaceutically acceptable carrier. In some embodiments, the airway inflammation symptoms are reduced by about 10% or more on a patient-reported outcome measure, as compared to prior to administration. In some aspects, provided herein is a pharmaceutical composition comprising an siRNA molecule which targets SEQ ID NO: 5357 and when administered to a patient in an effective amount improves sense of smell in the patient, wherein the patient comprises nasal polyposis, chronic sinusitis, allergic rhinitis, or NSAID-exacerbated respiratory disease, or a combination thereof, and wherein (i) the siRNA comprises a modification comprising a modified nucleoside and/or a modified internucleoside linkage, and/or (ii) the pharmaceutical composition comprises a pharmaceutically acceptable carrier. In some embodiments, the sense of smell is improved by about 10% or more on a patient-reported outcome measure, as compared to prior to administration. In some aspects, provided herein is a pharmaceutical composition comprising an siRNA molecule that inhibits the expression of ALOX15, wherein the siRNA comprises a sense strand and an antisense strand, each strand is independently about 14-30 nucleosides in length, and at least one of the sense strand and the antisense strand comprises a nucleoside sequence comprising about 14-30 contiguous nucleosides of SEQ ID NO: 6000 (C AGAGCTGCAG ACCTGGTGTC GAGAGATCAC TGAAATCGGG CTGCAAGGGG CCCAGGACCG AGGGTTTCCT GTCTCTTTAC AGGCTCGGGA CCAGGTTTGC CACTTTGTCA CCATGTGTAT CTTCACCTGC ACCGGCCAAC ACGCCTCTGT); wherein (i) the siRNA comprises a modification comprising a modified nucleoside and/or a modified internucleoside linkage, and/or (ii) the pharmaceutical composition comprises a pharmaceutically acceptable carrier. In some embodiments, the sense strand comprises about 14-30 contiguous nucleosides of SEQ ID NO: 6001 (C AGAGCTGCAG ACCTGGTGTC GAGAGATCAC TGAAATCGGG CTGCAAGGGG) or SEQ ID NO: 6002 (CTTTAC AGGCTCGGGA CCAGGTTTGC CACTTTGTCA CCATGTGTAT CTTCA). In some aspects, provided herein is a pharmaceutical composition comprising an siRNA molecule that inhibits the expression of ALOX15, wherein the siRNA comprises a sense strand and an antisense strand, each strand is independently about 14-30 nucleosides in length, and at least one of the sense strand and the antisense strand comprises a nucleoside sequence comprising about 14-30 contiguous nucleosides of SEQ ID NO: 6003 (A CCCTCTTCCC ATGTCCCACC CTCCCTAGAG GGGCACCTTT TCATGGTCTC TGCACCCAGT GAACACATTT TACTCTAGAG GCATCACCTG GGACCTTACT); wherein (i) the siRNA comprises a modification comprising a modified nucleoside and/or a modified internucleoside linkage, and/or (ii) the pharmaceutical composition comprises a pharmaceutically acceptable carrier. In some embodiments, the sense strand comprises about 14-30 contiguous nucleosides of SEQ ID NO: 6004 (TAGAG GGGCACCTTT TCATGGTCTC TGCACCCAGT GAACACATTT TACTC). In some aspects, provided herein is a pharmaceutical composition comprising an siRNA molecule that inhibits the expression of ALOX15, wherein the siRNA comprises a sense strand and an antisense strand, each strand is independently about 14-30 nucleosides in length, and at least one of the sense strand and the antisense strand comprises a nucleoside sequence comprising about 14-30 contiguous nucleosides of SEQ ID NO: 6005 (G ACATGGGAAT TTTCGACCAG ATAATGAGCA CTGGTGGGGG AGGCCACGTG CAGCTGCTCA AGCAAGCTGG AGCCTTCCTA ACCTACAGCT CCTTCTGTCC CCCTGATGAC TTGGCCGACC GGGGGCTCCT GGGAGTGAAG TCTTCCTTCT); wherein (i) the siRNA comprises a modification comprising a modified nucleoside and/or a modified internucleoside linkage, and/or (ii) the pharmaceutical composition comprises a pharmaceutically acceptable carrier. In some embodiments, the sense strand comprises about 14-30 contiguous nucleosides of SEQ ID NO: 6006 (G CAGCTGCTCA AGCAAGCTGG AGCCTTCCTA ACCTACAGCT CCTTCTGTCC).

[0008] In some embodiments, the pharmaceutical composition comprises the modified internucleoside linkage. In some embodiments, the modified internucleoside linkage comprises alkylphosphonate, phosphorothioate, methylphosphonate, phosphorodithioate, alkylphosphonothioate, phosphoramidate, carbamate, carbonate, phosphate triester, acetamidate, or carboxymethyl ester, or a combination thereof. In some embodiments, the modified internucleoside linkage comprises one or more phosphorothioate linkages. In some embodiments, the pharmaceutical composition comprises the modified nucleoside. In some embodiments, the modified nucleoside comprises a locked nucleic acid (LNA), hexitol nucleic acid (HLA), cyclohexene nucleic acid (CeNA), 2′-methoxyethyl, 2′-O-alkyl, 2′-O-allyl, 2′-O-allyl, 2′-fluoro, or 2′-deoxy, or a combination thereof. In some embodiments, the modified nucleoside comprises a 2′-O-methyl nucleoside, 2′-deoxyfluoro nucleoside, 2′-O—N-methylacetamido (2′-O-NMA) nucleoside, a 2′-O-dimethylaminoethoxyethyl (2′-O-DMAEOE) nucleoside, 2′-O-aminopropyl (2′-O-AP) nucleoside, or 2′-ara-F, or a combination thereof. In some embodiments, the modified nucleoside comprises one or more 2′fluoro modified nucleosides. In some embodiments, the modified nucleoside comprises a 2′ O-alkyl modified nucleoside. In some embodiments, the siRNA comprises a ribose. In some embodiments, the pharmaceutical composition further comprises a lipid attached at either 3′ or 5′ terminus of the sense strand and/or antisense strand of the siRNA. In some embodiments, the lipid comprises cholesterol, myristoyl, palmitoyl, stearoyl, lithocholoyl, docosanoyl, docosahexaenoyl, myristyl, palmityl stearyl, or α-tocopherol, or a combination thereof. In some embodiments, the sense strand and the antisense strand form a double-stranded RNA duplex. In some embodiments, the double-stranded RNA duplex comprises from about 14 to about 30 nucleosides. In some embodiments, the first base pair of the double-stranded RNA duplex is an AU base pair.

[0009] In some embodiments, the sense strand comprises pattern 1S: 5′ fN s mN s fN-mN-fN-mN-fN-fN-fN-mN-fN-mN-fN-mN-fN-mN-fN-mN-fN s mN s mN 3′, wherein “fN” is a 2′ fluoro-modified nucleoside, “mN” is a 2′ O-methyl modified nucleoside, “-” is a phosphodiester, and “s” is a phosphorothioate. In some embodiments, the sense strand comprises pattern 2S: 5′ mN s mN s mN-mN-fN-mN-fN-fN-fN-mN-mN-mN-mN-mN-mN-mN-mN-mN-mN s mN s mN 3′, wherein “fN” is a 2′ fluoro-modified nucleoside, “mN” is a 2′ O-methyl modified nucleoside, “-” is a phosphodiester, and “s” is a phosphorothioate. In some embodiments, the sense strand comprises pattern 3S: 5′ mN s mN s mN-mN-fN-mN-fN-mN-fN-mN-mN-mN-mN-mN-mN-mN-mN-mN-mN s mN s mN 3′, wherein “fN” is a 2′ fluoro-modified nucleoside, “mN” is a 2′ O-methyl modified nucleoside, “-” is a phosphodiester, and “s” is a phosphorothioate. In some embodiments, the sense strand comprises pattern 4S: 5′ fN s mN s fN-mN-fN-mN-fN-fN-fN-mN-fN-mN-fN-mN-fN-mN-fN-mN-fN s mN s mN-N-Lipid 3′, wherein “fN” is a 2′ fluoro-modified nucleoside, “mN” is a 2′ O-methyl modified nucleoside, “-” is a phosphodiester, “s” is a phosphorothioate, and N comprises one or more nucleosides. In some embodiments, the sense strand comprises pattern 5S: 5′ mN s mN s mN-mN-fN-mN-fN-fN-fN-mN-mN-mN-mN-mN-mN-mN-mN-mN-mN s mN s mN-N-Lipid 3′, wherein “fN” is a 2′ fluoro-modified nucleoside, “mN” is a 2′ O-methyl modified nucleoside, “-” is a phosphodiester, “s” is a phosphorothioate, and N comprises one or more nucleosides. In some embodiments, the antisense strand comprises pattern 1AS: 5′ mN s fN s mN-fN-mN-fN-mN-fN-mN-fN-mN-mN-mN-fN-mN-fN-mN-fN-mN s mN s mN 3′, wherein “fN” is a 2′ fluoro-modified nucleoside, “mN” is a 2′ O-methyl modified nucleoside, “-” is a phosphodiester, and “s” is a phosphorothioate. In some embodiments, the antisense strand comprises pattern 2AS: 5′ mN s fN s mN-mN-mN-fN-mN-fN-fN-mN-mN-mN-mN-fN-mN-fN-mN-mN-mN s mN s mN 3′, wherein “fN” is a 2′ fluoro-modified nucleoside, “mN” is a 2′ O-methyl modified nucleoside, “-” is a phosphodiester, and “s” is a phosphorothioate. In some embodiments, the antisense strand comprises pattern 3AS: 5′ mN s fN s mN-mN-mN-fN-mN-mN-mN-mN-mN-mN-mN-fN-mN-fN-mN-mN-mN s mN s mN 3′, wherein “fN” is a 2′ fluoro-modified nucleoside, “mN” is a 2′ O-methyl modified nucleoside, “-” is a phosphodiester, and “s” is a phosphorothioate. In some embodiments, the antisense strand comprises pattern 4AS: 5′ mN s fN s mN-fN-mN-fN-mN-mN-mN-mN-mN-mN-mN-fN-mN-fN-mN-mN-mN s mN s mN 3′, wherein “fN” is a 2′ fluoro-modified nucleoside, “mN” is a 2′ O-methyl modified nucleoside, “-” is a phosphodiester, and “s” is a phosphorothioate. In some embodiments, the sense strand comprises pattern 1S and the antisense strand comprises pattern 1AS, 2AS, 3AS, or 4AS. In some embodiments, the sense strand comprises pattern 2S and the antisense strand comprises pattern 1AS, 2AS, 3AS, or 4AS. In some embodiments, the sense strand comprises pattern 3S and the antisense strand comprises pattern 1AS, 2AS, 3AS, or 4AS. In some embodiments, the sense strand comprises pattern 4S and the antisense strand comprises pattern 1AS, 2AS, 3AS, or 4AS.

[0010] In some embodiments, (i) the sense strand comprises SEQ ID NO: 3027 or a nucleic acid sequence thereof having about 1 or 2 nucleoside substitutions, additions, or deletions, and the antisense strand comprises SEQ ID NO: 3028 or a nucleic acid sequence thereof having about 1 or 2 nucleoside substitutions, additions, or deletions; (ii) the sense strand comprises SEQ ID NO: 5664 or a nucleic acid sequence thereof having about 1 or 2 nucleoside substitutions, additions, or deletions, and the antisense strand comprises SEQ ID NO: 5765 or a nucleic acid sequence thereof having about 1 or 2 nucleoside substitutions, additions, or deletions; (iii) the sense strand comprises SEQ ID NO: 5866 or a nucleic acid sequence thereof having about 1 or 2 nucleoside substitutions, additions, or deletions, and the antisense strand comprises SEQ ID NO: 5967 or a nucleic acid sequence thereof having about 1 or 2 nucleoside substitutions, additions, or deletions; (iv) the sense strand comprises SEQ ID NO: 5558 or a nucleic acid sequence thereof having about 1 or 2 nucleoside substitutions, additions, or deletions, and the antisense strand comprises SEQ ID NO: 5559 or a nucleic acid sequence thereof having about 1 or 2 nucleoside substitutions, additions, or deletions; or (v) the sense strand comprises SEQ ID NO: 5456 or a nucleic acid sequence thereof having about 1 or 2 nucleoside substitutions, additions, or deletions, and the antisense strand comprises SEQ ID NO: 5457 or a nucleic acid sequence thereof having about 1 or 2 nucleoside substitutions, additions, or deletions.

[0011] In some embodiments, (i) the sense strand comprises SEQ ID NO: 3037 or a nucleic acid sequence thereof having about 1 or 2 nucleoside substitutions, additions, or deletions, and the antisense strand comprises SEQ ID NO: 3038 or a nucleic acid sequence thereof having about 1 or 2 nucleoside substitutions, additions, or deletions; (ii) the sense strand comprises SEQ ID NO: 5665 or a nucleic acid sequence thereof having about 1 or 2 nucleoside substitutions, additions, or deletions, and the antisense strand comprises SEQ ID NO: 5766 or a nucleic acid sequence thereof having about 1 or 2 nucleoside substitutions, additions, or deletions; (iii) the sense strand comprises SEQ ID NO: 5867 or a nucleic acid sequence thereof having about 1 or 2 nucleoside substitutions, additions, or deletions, and the antisense strand comprises SEQ ID NO: 5968 or a nucleic acid sequence thereof having about 1 or 2 nucleoside substitutions, additions, or deletions; (iv) the sense strand comprises SEQ ID NO: 5560 or a nucleic acid sequence thereof having about 1 or 2 nucleoside substitutions, additions, or deletions, and the antisense strand comprises SEQ ID NO: 5561 or a nucleic acid sequence thereof having about 1 or 2 nucleoside substitutions, additions, or deletions; or (v) the sense strand comprises SEQ ID NO: 5460 or a nucleic acid sequence thereof having about 1 or 2 nucleoside substitutions, additions, or deletions, and the antisense strand comprises SEQ ID NO: 5461 or a nucleic acid sequence thereof having about 1 or 2 nucleoside substitutions, additions, or deletions.

[0012] In some embodiments, (i) the sense strand comprises SEQ ID NO: 3183 or a nucleic acid sequence thereof having about 1 or 2 nucleoside substitutions, additions, or deletions, and the antisense strand comprises SEQ ID NO: 3184 or a nucleic acid sequence thereof having about 1 or 2 nucleoside substitutions, additions, or deletions; (ii) the sense strand comprises SEQ ID NO: 5666 or a nucleic acid sequence thereof having about 1 or 2 nucleoside substitutions, additions, or deletions, and the antisense strand comprises SEQ ID NO: 5767 or a nucleic acid sequence thereof having about 1 or 2 nucleoside substitutions, additions, or deletions; (iii) the sense strand comprises SEQ ID NO: 5868 or a nucleic acid sequence thereof having about 1 or 2 nucleoside substitutions, additions, or deletions, and the antisense strand comprises SEQ ID NO: 5969 or a nucleic acid sequence thereof having about 1 or 2 nucleoside substitutions, additions, or deletions; (iv) or the sense strand comprises SEQ ID NO: 5562 or a nucleic acid sequence thereof having about 1 or 2 nucleoside substitutions, additions, or deletions, and the antisense strand comprises SEQ ID NO: 5563 or a nucleic acid sequence thereof having about 1 or 2 nucleoside substitutions, additions, or deletions; or (v) the sense strand comprises SEQ ID NO: 5476 or a nucleic acid sequence thereof having about 1 or 2 nucleoside substitutions, additions, or deletions, and the antisense strand comprises SEQ ID NO: 5477 or a nucleic acid sequence thereof having about 1 or 2 nucleoside substitutions, additions, or deletions.

[0013] In some embodiments, (i) the sense strand comprises SEQ ID NO: 4265 or a nucleic acid sequence thereof having about 1 or 2 nucleoside substitutions, additions, or deletions, and the antisense strand comprises SEQ ID NO: 4266 or a nucleic acid sequence thereof having about 1 or 2 nucleoside substitutions, additions, or deletions; (ii) the sense strand comprises SEQ ID NO: 5667 or a nucleic acid sequence thereof having about 1 or 2 nucleoside substitutions, additions, or deletions, and the antisense strand comprises SEQ ID NO: 5768 or a nucleic acid sequence thereof having about 1 or 2 nucleoside substitutions, additions, or deletions; (iii) the sense strand comprises SEQ ID NO: 5869 or a nucleic acid sequence thereof having about 1 or 2 nucleoside substitutions, additions, or deletions, and the antisense strand comprises SEQ ID NO: 5970 or a nucleic acid sequence thereof having about 1 or 2 nucleoside substitutions, additions, or deletions; (iv) the sense strand comprises SEQ ID NO: 5564 or a nucleic acid sequence thereof having about 1 or 2 nucleoside substitutions, additions, or deletions, and the antisense strand comprises SEQ ID NO: 5565 or a nucleic acid sequence thereof having about 1 or 2 nucleoside substitutions, additions, or deletions; or (v) the sense strand comprises SEQ ID NO: 5510 or a nucleic acid sequence thereof having about 1 or 2 nucleoside substitutions, additions, or deletions, and the antisense strand comprises SEQ ID NO: 5511 or a nucleic acid sequence thereof having about 1 or 2 nucleoside substitutions, additions, or deletions.

[0014] In some embodiments, (i) the sense strand comprises SEQ ID NO: 2629 or a nucleic acid sequence thereof having about 1 or 2 nucleoside substitutions, additions, or deletions, and the antisense strand comprises SEQ ID NO: 2630 or a nucleic acid sequence thereof having about 1 or 2 nucleoside substitutions, additions, or deletions; (ii) the sense strand comprises SEQ ID NO: 5668 or a nucleic acid sequence thereof having about 1 or 2 nucleoside substitutions, additions, or deletions, and the antisense strand comprises SEQ ID NO: 5769 or a nucleic acid sequence thereof having about 1 or 2 nucleoside substitutions, additions, or deletions; (iii) the sense strand comprises SEQ ID NO: 5870 or a nucleic acid sequence thereof having about 1 or 2 nucleoside substitutions, additions, or deletions, and the antisense strand comprises SEQ ID NO: 5971 or a nucleic acid sequence thereof having about 1 or 2 nucleoside substitutions, additions, or deletions; (iv) the sense strand comprises SEQ ID NO: 5566 or a nucleic acid sequence thereof having about 1 or 2 nucleoside substitutions, additions, or deletions, and the antisense strand comprises SEQ ID NO: 5567 or a nucleic acid sequence thereof having about 1 or 2 nucleoside substitutions, additions, or deletions; or (v) the sense strand comprises SEQ ID NO: 5524 or a nucleic acid sequence thereof having about 1 or 2 nucleoside substitutions, additions, or deletions, and the antisense strand comprises SEQ ID NO: 5525 or a nucleic acid sequence thereof having about 1 or 2 nucleoside substitutions, additions, or deletions.

[0015] In some embodiments, the sense strand comprises

(SEQ ID NO: 5558)
mUsmGsmGmUfGmUfCfGfAmGmAmGmAmUmCmAmCmUmAsmUsmU,
(SEQ ID NO: 5560)
mUsmCsmGmAfGmAfGfAfUmCmAmCmUmGmAmAmAmUmAsmUsmU,
(SEQ ID NO: 5562)
mCsmAsmGmGfUmUfUfGfCmCmAmCmUmUmUmGmUmCmAsmUsmU,
(SEQ ID NO: 5564)
mGsmCsmAmCfCmUfUfUfUmCmAmUmGmGmUmCmUmCmAsmUsmU,
(SEQ ID NO: 5566)
mAsmGsmCmUfGmGfAfGfCmCmUmUmCmCmUmAmAmCmAsmUsmU,
(SEQ ID NO: 5456)
fUsmGsfGmUfGmUfCfGfAmGfAmGfAmUfCmAfCmUfAsmUsmU,
(SEQ ID NO: 5460)
fUsmCsfGmAfGmAfGfAfUmCfAmCfUmGfAmAfAmUfAsmUsmU,
(SEQ ID NO: 5476)
fCsmAsfGmGfUmUfUfGfCmCfAmCfUmUfUmGfUmCfAsmUsmU,
(SEQ ID NO: 5510)
fGsmCsfAmCfCmUfUfUfUmCfAmUfGmGfUmCfUmCfAsmUsmU,
(SEQ ID NO: 5524)
fAsmGsfCmUfGmGfAfGfCmCfUmUfCmCfUmAfAmCfAsmUsmU,
(SEQ ID NO: 6050)
mUsmGsmGmUfGmUfCmGfAmGmAmGmAmUmCmAmCmUmAsmUsmU,
(SEQ ID NO: 6051)
mUsmCsmGmAfGmAfGmAfUmCmAmCmUmGmAmAmAmUmAsmUsmU,
(SEQ ID NO: 6052)
mCsmAsmGmGfUmUfUmGfCmCmAmCmUmUmUmGmUmCmAsmUsmU,
(SEQ ID NO: 6053)
mGsmCsmAmCfCmUfUmUfUmCmAmUmGmGmUmCmUmCmAsmUsmU,
(SEQ ID NO: 6054)
mAsmGsmCmUfGmGfAmGfCmCmUmUmCmCmUmAmAmCmAsmUsmU,
(SEQ ID NO: 6055)
fUsmGsfGmUfGmUfCfGfAmGfAmGfAmUfCmAfCmUfAsmUsmUNNN-
lipid,
(SEQ ID NO: 6056)
fUsmCsfGmAfGmAfGfAfUmCfAmCfUmGfAmAfAmUfAsmUsmUNNN-
lipid,
(SEQ ID NO: 6057)
fCsmAsfGmGfUmUfUfGfCmCfAmCfUmUfUmGfUmCfAsmUsmUNNN-
lipid,
(SEQ ID NO: 6058)
fGsmCsfAmCfCmUfUfUfUmCfAmUfGmGfUmCfUmCfAsmUsmUNNN-
lipid,
(SEQ ID NO: 6059)
fAsmGsfCmUfGmGfAfGfCmCfUmUfCmCfUmAfAmCfAsmUsmUNNN-
lipid,
(SEQ ID NO: 6060)
mUsmGsmGmUfGmUfCfGfAmGmAmGmAmUmCmAmCmUmAsmUsmUNNN-
lipid,
(SEQ ID NO: 6061)
mUsmCsmGmAfGmAfGfAfUmCmAmCmUmGmAmAmAmUmAsmUsmUNNN-
lipid,
(SEQ ID NO: 6062)
mCsmAsmGmGfUmUfUfGfCmCmAmCmUmUmUmGmUmCmAsmUsmUNNN-
lipid,
(SEQ ID NO: 6063)
mGsmCsmAmCfCmUfUfUfUmCmAmUmGmGmUmCmUmCmAsmUsmUNNN-
lipid,
or
(SEQ ID NO: 6064)
mAsmGsmCmUfGmGfAfGfCmCmUmUmCmCmUmAmAmCmAsmUsmUNNN-
lipid,

or any combination thereof.

[0016] In some embodiments, the antisense strand comprises

(SEQ ID NO: 5559)
mUsfAsmGmUmGfAmUmCmUmCmUmCmGfAmCfAmCmCmAsmUsmU,
(SEQ ID NO: 5561)
mUsfAsmUmUmUfCmAmGmUmGmAmUmCfUmCfUmCmGmAsmUsmU,
(SEQ ID NO: 5563)
mUsfGsmAmCmAfAmAmGmUmGmGmCmAfAmAfCmCmUmGsmUsmU,
(SEQ ID NO: 5565)
mUsfGsmAmGmAfCmCmAmUmGmAmAmAfAmGfGmUmGmCsmUsmU,
(SEQ ID NO: 5567)
mUsfGsmUmUmAfGmGmAmAmGmGmCmUfCmCfAmGmCmUsmUsmU,
(SEQ ID NO: 5457)
mUsfAsmGfUmGfAmUfCmUfCmUmCmGfAmCfAmCfCmAsmUsmU,
(SEQ ID NO: 5461)
mUsfAsmUfUmUfCmAfGmUfGmAmUmCfUmCfUmCfGmAsmUsmU,
(SEQ ID NO: 5477)
mUsfGsmAfCmAfAmAfGmUfGmGmCmAfAmAfCmCfUmGsmUsmU,
(SEQ ID NO: 5511)
mUsfGsmAfGmAfCmCfAmUfGmAmAmAfAmGfGmUfGmCsmUsmU,
(SEQ ID NO: 5525)
mUsfGsmUfUmAfGmGfAmAfGmGmCmUfCmCfAmGfCmUsmUsmU,
(SEQ ID NO: 6065)
mUsfAsmGmUmGfAmUfCfUmCmUmCmGfAmCfAmCmCmAsmUsmU,
(SEQ ID NO: 6066)
mUsfAsmUmUmUfCmAfGfUmGmAmUmCfUmCfUmCmGmAsmUsmU,
(SEQ ID NO: 6067)
mUsfGsmAmCmAfAmAfGfUmGmGmCmAfAmAfCmCmUmGsmUsmU,
(SEQ ID NO: 6068)
mUsfGsmAmGmAfCmCfAfUmGmAmAmAfAmGfGmUmGmCsmUsmU,
(SEQ ID NO: 6069)
mUsfGsmUmUmAfGmGfAfAmGmGmCmUfCmCfAmGmCmUsmUsmU,
(SEQ ID NO: 6070)
mUsfAsmGfUmGfAmUmCmUmCmUmCmGfAmCfAmCmCmAsmUsmU,
(SEQ ID NO: 6071)
mUsfAsmUfUmUfCmAmGmUmGmAmUmCfUmCfUmCmGmAsmUsmU,
(SEQ ID NO: 6072)
mUsfGsmAfCmAfAmAmGmUmGmGmCmAfAmAfCmCmUmGsmUsmU,
(SEQ ID NO: 6073)
mUsfGsmAfGmAfCmCmAmUmGmAmAmAfAmGfGmUmGmCsmUsmU,
or
(SEQ ID NO: 6074)
mUsfGsmUfUmAfGmGmAmAmGmGmCmUfCmCfAmGmCmUsmUsmU,

or any combination thereof.

[0017] In some embodiments, the sense strand or antisense strand comprises one or more sequences selected from SEQ ID NOS: 1-5349, 5366-5971, 6000-6038, 6050-6074, or a nucleic acid sequence thereof having about 1 or 2 nucleoside substitutions, additions, or deletions. In some embodiments, the sense strand or antisense strand comprises one or more sequences comprising the first 19 nucleobases of a sequence selected from SEQ ID NOS: 1-5349, 5366-5971, 6000-6038, 6050-6074, or a nucleic acid sequence thereof having about 1 or 2 nucleoside substitutions, additions, or deletions.

[0018] In some aspects, provided herein is a pharmaceutical composition comprising a nucleic acid sequence comprising Formula IA: 5′ Z1-U-Z2-G-Z3-U-C-Z4-A-U-U-Z5-L 3′ wherein Z1 is 0, 3, 5, 11, or 13 nucleosides; Z2 is 1 nucleoside; Z3 is 0, 2, 5, 8, or 10 nucleosides; Z4 is 0, 2, 3, 5, 8, or 11 nucleosides; Z5 is 0 or 3 nucleosides; each “-” is independently a phosphodiester or modified internucleoside linkage; and L is an optional lipid; wherein the nucleic acid comprises a modified nucleoside and/or modified internucleoside linkage. In some embodiments, Z1 comprises 0 nucleosides or UGGUG, CAGGU, CAGGUUUGCCACU (SEQ ID NO: 6007), GCACCUUUUCA (SEQ ID NO: 6008), or AGC; Z2 comprises C, G, or U; Z3 comprises 0 nucleosides or UG, UGUCGAGAGA (SEQ ID NO: 6009), AGAGA, AGAGA, CCACUUUG, or AGCCU; Z4 comprises 0 nucleosides or GAGAGAUCACU (SEQ ID NO: 6010), ACU, ACUGAAAU, UC, or CUAAC; and Z5 comprises 0 nucleosides or UUU, UUC, UUA, UUG, CUU, CUC, CUA, CUG, AUU, AUC, AUA, AUG, GUU, GUC, GUA, GUG, UCU, UCC, UCA, UCG, CCU, CCC, CCA, CCG, ACU, ACC, ACA, ACG, GCU, GCC, GCA, GCG, UAU, UAC, UAA, UAG, CAU, CAC, CAA, CAG, AAU, AAC, AAA, AAG, GAU, GAC, GAA, GAG, UGU, UGC, UGA, UGG, CGU, CGC, CGA, CGG, AGU, AGC, AGA, AGG, GGU, GGC, GGA, or GGG. In some aspects, provided herein is a pharmaceutical composition comprising a nucleic acid sequence comprising Formula IB: 5′ U-Z6-G-A-Z7-C-Z8-A-Z9-U-U 3′ wherein Z6 represents 0, 2, 3, 5, 8, or 11 nucleosides; Z7 represents 0, 2, 5, 8, or 10 nucleosides; Z8 represents 1 nucleoside; Z9 represents 0, 3, 5, 11, or 13 nucleosides; and each “-” is independently a phosphodiester or modified internucleoside linkage. In some embodiments, the nucleic acid sequence comprising Formula IA is a sense strand, and the pharmaceutical composition further comprises an anti-sense strand comprising Formula IB: 5′ U-Z6-G-A-Z7-C-Z8-A-Z9-U-U 3′ wherein Z6 represents 0, 2, 3, 5, 8, or 11 nucleosides; Z7 represents 0, 2, 5, 8, or 10 nucleosides; Z8 represents 1 nucleoside; Z9 represents 0, 3, 5, 11, or 13 nucleosides; and each “-” is independently a phosphodiester or modified internucleoside linkage. In some embodiments, Z6 is 0 nucleosides or AGU, AGUGAUCUCUC (SEQ ID NO: 6016), AUUUCAGU, GA, or GUUAG; Z7 is 0 nucleosides or UCUCU, CA, UCUCU, CAAAGUGG, GA, or AGGCU; Z8 is C, G, or A; and Z9 is CACCA, AGUGGCAAACCUG (SEQ ID NO: 6017), ACCUG, UGAAAAGGUGC (SESQ ID NO: 6018), or GCU.

[0019] In some aspects, provided herein is a pharmaceutical composition comprising a sense strand and an antisense strand, wherein (i) the sense strand comprises SEQ ID NO: 3027 or a nucleic acid sequence thereof having about 1 or 2 nucleoside substitutions, additions, or deletions, and the antisense strand comprises SEQ ID NO: 3028 or a nucleic acid sequence thereof having about 1 or 2 nucleoside substitutions, additions, or deletions; (ii) the sense strand comprises SEQ ID NO: 5664 or a nucleic acid sequence thereof having about 1 or 2 nucleoside substitutions, additions, or deletions, and the antisense strand comprises SEQ ID NO: 5765 or a nucleic acid sequence thereof having about 1 or 2 nucleoside substitutions, additions, or deletions; (iii) the sense strand comprises SEQ ID NO: 5866 or a nucleic acid sequence thereof having about 1 or 2 nucleoside substitutions, additions, or deletions, and the antisense strand comprises SEQ ID NO: 5967 or a nucleic acid sequence thereof having about 1 or 2 nucleoside substitutions, additions, or deletions; (iv) the sense strand comprises SEQ ID NO: 5558 or a nucleic acid sequence thereof having about 1 or 2 nucleoside substitutions, additions, or deletions, and the antisense strand comprises SEQ ID NO: 5559 or a nucleic acid sequence thereof having about 1 or 2 nucleoside substitutions, additions, or deletions; or (v) the sense strand comprises SEQ ID NO: 5456 or a nucleic acid sequence thereof having about 1 or 2 nucleoside substitutions, additions, or deletions, and the antisense strand comprises SEQ ID NO: 5457 or a nucleic acid sequence thereof having about 1 or 2 nucleoside substitutions, additions, or deletions.

[0020] In some aspects, provided herein is a pharmaceutical composition comprising a sense strand and an antisense strand, wherein (i) the sense strand comprises SEQ ID NO: 3037 or a nucleic acid sequence thereof having about 1 or 2 nucleoside substitutions, additions, or deletions, and the antisense strand comprises SEQ ID NO: 3038 or a nucleic acid sequence thereof having about 1 or 2 nucleoside substitutions, additions, or deletions; (ii) the sense strand comprises SEQ ID NO: 5665 or a nucleic acid sequence thereof having about 1 or 2 nucleoside substitutions, additions, or deletions, and the antisense strand comprises SEQ ID NO: 5766 or a nucleic acid sequence thereof having about 1 or 2 nucleoside substitutions, additions, or deletions; (iii) the sense strand comprises SEQ ID NO: 5867 or a nucleic acid sequence thereof having about 1 or 2 nucleoside substitutions, additions, or deletions, and the antisense strand comprises SEQ ID NO: 5968 or a nucleic acid sequence thereof having about 1 or 2 nucleoside substitutions, additions, or deletions; (iv) the sense strand comprises SEQ ID NO: 5560 or a nucleic acid sequence thereof having about 1 or 2 nucleoside substitutions, additions, or deletions, and the antisense strand comprises SEQ ID NO: 5561 or a nucleic acid sequence thereof having about 1 or 2 nucleoside substitutions, additions, or deletions; or (v) the sense strand comprises SEQ ID NO: 5460 or a nucleic acid sequence thereof having about 1 or 2 nucleoside substitutions, additions, or deletions, and the antisense strand comprises SEQ ID NO: 5461 or a nucleic acid sequence thereof having about 1 or 2 nucleoside substitutions, additions, or deletions.

[0021] In some aspects, provided herein is a pharmaceutical composition comprising a sense strand and an antisense strand, wherein (i) the sense strand comprises SEQ ID NO: 3183 or a nucleic acid sequence thereof having about 1 or 2 nucleoside substitutions, additions, or deletions, and the antisense strand comprises SEQ ID NO: 3184 or a nucleic acid sequence thereof having about 1 or 2 nucleoside substitutions, additions, or deletions; (ii) the sense strand comprises SEQ ID NO: 5666 or a nucleic acid sequence thereof having about 1 or 2 nucleoside substitutions, additions, or deletions, and the antisense strand comprises SEQ ID NO: 5767 or a nucleic acid sequence thereof having about 1 or 2 nucleoside substitutions, additions, or deletions; (iii) the sense strand comprises SEQ ID NO: 5868 or a nucleic acid sequence thereof having about 1 or 2 nucleoside substitutions, additions, or deletions, and the antisense strand comprises SEQ ID NO: 5969 or a nucleic acid sequence thereof having about 1 or 2 nucleoside substitutions, additions, or deletions; (iv) or the sense strand comprises SEQ ID NO: 5562 or a nucleic acid sequence thereof having about 1 or 2 nucleoside substitutions, additions, or deletions, and the antisense strand comprises SEQ ID NO: 5563 or a nucleic acid sequence thereof having about 1 or 2 nucleoside substitutions, additions, or deletions; or (v) the sense strand comprises SEQ ID NO: 5476 or a nucleic acid sequence thereof having about 1 or 2 nucleoside substitutions, additions, or deletions, and the antisense strand comprises SEQ ID NO: 5477 or a nucleic acid sequence thereof having about 1 or 2 nucleoside substitutions, additions, or deletions.

[0022] In some aspects, provided herein is a pharmaceutical composition comprising a sense strand and an antisense strand, wherein (i) the sense strand comprises SEQ ID NO: 4265 or a nucleic acid sequence thereof having about 1 or 2 nucleoside substitutions, additions, or deletions, and the antisense strand comprises SEQ ID NO: 4266 or a nucleic acid sequence thereof having about 1 or 2 nucleoside substitutions, additions, or deletions; (ii) the sense strand comprises SEQ ID NO: 5667 or a nucleic acid sequence thereof having about 1 or 2 nucleoside substitutions, additions, or deletions, and the antisense strand comprises SEQ ID NO: 5768 or a nucleic acid sequence thereof having about 1 or 2 nucleoside substitutions, additions, or deletions; (iii) the sense strand comprises SEQ ID NO: 5869 or a nucleic acid sequence thereof having about 1 or 2 nucleoside substitutions, additions, or deletions, and the antisense strand comprises SEQ ID NO: 5970 or a nucleic acid sequence thereof having about 1 or 2 nucleoside substitutions, additions, or deletions; (iv) the sense strand comprises SEQ ID NO: 5564 or a nucleic acid sequence thereof having about 1 or 2 nucleoside substitutions, additions, or deletions, and the antisense strand comprises SEQ ID NO: 5565 or a nucleic acid sequence thereof having about 1 or 2 nucleoside substitutions, additions, or deletions; or (v) the sense strand comprises SEQ ID NO: 5510 or a nucleic acid sequence thereof having about 1 or 2 nucleoside substitutions, additions, or deletions, and the antisense strand comprises SEQ ID NO: 5511 or a nucleic acid sequence thereof having about 1 or 2 nucleoside substitutions, additions, or deletions.

[0023] In some aspects, provided herein is a pharmaceutical composition comprising a sense strand and an antisense strand, wherein (i) the sense strand comprises SEQ ID NO: 2629 or a nucleic acid sequence thereof having about 1 or 2 nucleoside substitutions, additions, or deletions, and the antisense strand comprises SEQ ID NO: 2630 or a nucleic acid sequence thereof having about 1 or 2 nucleoside substitutions, additions, or deletions; (ii) the sense strand comprises SEQ ID NO: 5668 or a nucleic acid sequence thereof having about 1 or 2 nucleoside substitutions, additions, or deletions, and the antisense strand comprises SEQ ID NO: 5769 or a nucleic acid sequence thereof having about 1 or 2 nucleoside substitutions, additions, or deletions; (iii) the sense strand comprises SEQ ID NO: 5870 or a nucleic acid sequence thereof having about 1 or 2 nucleoside substitutions, additions, or deletions, and the antisense strand comprises SEQ ID NO: 5971 or a nucleic acid sequence thereof having about 1 or 2 nucleoside substitutions, additions, or deletions; (iv) the sense strand comprises SEQ ID NO: 5566 or a nucleic acid sequence thereof having about 1 or 2 nucleoside substitutions, additions, or deletions, and the antisense strand comprises SEQ ID NO: 5567 or a nucleic acid sequence thereof having about 1 or 2 nucleoside substitutions, additions, or deletions; or (v) the sense strand comprises SEQ ID NO: 5524 or a nucleic acid sequence thereof having about 1 or 2 nucleoside substitutions, additions, or deletions, and the antisense strand comprises SEQ ID NO: 5525 or a nucleic acid sequence thereof having about 1 or 2 nucleoside substitutions, additions, or deletions.

[0024] In some aspects, provided herein is a pharmaceutical composition comprising a sense strand and an antisense strand, wherein the sense strand or antisense strand comprises one or more sequences selected from SEQ ID NOS: 1-5349, 5366-5971, 6000-6038, 6050-6074; or a nucleic acid sequence thereof having about 1 or 2 nucleoside substitutions, additions, or deletions. In some embodiments, the sense strand comprises SEQ ID NO: 5866. In some embodiments, the sense strand comprises SEQ ID NO: 5867. In some embodiments, the sense strand comprises SEQ ID NO: 5868. In some embodiments, the sense strand comprises SEQ ID NO: 5869. In some embodiments, the sense strand comprises SEQ ID NO: 5870. In some embodiments, the antisense strand comprises SEQ ID NO: 5967. In some embodiments, the antisense strand comprises SEQ ID NO: 5968. In some embodiments, the antisense strand comprises SEQ ID NO: 5969. In some embodiments, the antisense strand comprises SEQ ID NO: 5970. In some embodiments, the antisense strand comprises SEQ ID NO: 5971. In some embodiments, the sense strand comprises pattern 1S. In some embodiments, the sense strand comprises pattern 2S. In some embodiments, the sense strand comprises pattern 3S. In some embodiments, the sense strand comprises pattern 4S. In some embodiments, the sense strand comprises pattern 5S. In some embodiments, the antisense strand comprises pattern 1AS. In some embodiments, the antisense strand comprises pattern 2AS. In some embodiments, the antisense strand comprises pattern 3AS. In some embodiments, the antisense strand comprises pattern 4AS. In some aspects, provided herein is a pharmaceutical composition comprising a sense strand and an antisense strand, wherein the sense strand or antisense strand comprises one or more sequences comprising the first 19 nucleobases of a sequence selected from SEQ ID NOS: 1-5349, 5366-5971, 6000-6038, 6050-6074; or a nucleic acid sequence thereof having about 1 or 2 nucleoside substitutions, additions, or deletions.

[0025] In some embodiments, the pharmaceutical composition comprises a pharmaceutically acceptable carrier. In some embodiments, the pharmaceutical composition comprises a modified internucleoside linkage. In some embodiments, the modified internucleoside linkage comprises alkylphosphonate, phosphorothioate, methylphosphonate, phosphorodithioate, alkylphosphonothioate, phosphoramidate, carbamate, carbonate, phosphate triester, acetamidate, or carboxymethyl ester, or a combination thereof. In some embodiments, the modified internucleoside linkage comprises one or more phosphorothioate linkages. In some embodiments, the pharmaceutical composition comprises a modified nucleoside. In some embodiments, the modified nucleoside comprises a locked nucleic acid (LNA), hexitol nucleic acid (HLA), cyclohexene nucleic acid (CeNA), 2′-methoxyethyl, 2′-O-alkyl, 2′-O-allyl, 2′-O-allyl, 2′-fluoro, or 2′-deoxy, or a combination thereof. In some embodiments, the modified nucleoside comprises a 2′-O-methyl nucleoside, 2′-deoxyfluoro nucleoside, 2′-O—N-methylacetamido (2′-O-NMA) nucleoside, a 2′-O-dimethylaminoethoxyethyl (2′-O-DMAEOE) nucleoside, 2′-O-aminopropyl (2′-O-AP) nucleoside, or 2′-ara-F, or a combination thereof. In some embodiments, the modified nucleoside comprises one or more 2′fluoro modified nucleosides. In some embodiments, the modified nucleoside comprises a 2′ O-alkyl modified nucleoside. In some embodiments, the pharmaceutical composition comprises a ribose. In some embodiments, the pharmaceutical composition comprises a lipid. In some embodiments, the lipid comprises cholesterol, myristoyl, palmitoyl, stearoyl, lithocholoyl, docosanoyl, docosahexaenoyl, myristyl, palmityl stearyl, or α-tocopherol, or a combination thereof. In some embodiments, the sense strand and the antisense strand form a double-stranded RNA duplex. In some embodiments, the first base pair of the double-stranded RNA duplex is an AU base pair.

[0026] In some aspects, provided herein is a method of treating one or more disorders of the upper and lower airway in a patient in need thereof, the method comprising administering to the patient a pharmaceutical composition provided herein. In some embodiments, the one or more disorders of the upper and lower airways comprises nasal polyposis, chronic sinusitis, allergic rhinitis, or NSAID-exacerbated respiratory disease, or a combination thereof. In some embodiments, the siRNA is administered in an effective amount to reduce eosinophil count in the patient. In some embodiments, the siRNA is administered in an effective amount to reduce number and/or size of nasal polyps in the patient. In some embodiments, the siRNA is administered in an effective amount to increase nasal inspiratory peak in the patient. In some embodiments, the siRNA is administered in an effective amount to reduce airway symptoms in the patient.

[0027] In some embodiments, provided herein is an RNA interference (RNAi) agent capable of inhibiting the expression of a target gene, wherein the RNAi agent comprises a double-stranded RNA (dsRNA) comprising a sense strand and an antisense strand, each strand having 14 to 30 nucleotides. In some instances, the RNAi comprises a double-stranded region of 17-30 nucleotide pairs in length. In some instances, the sense strand and antisense strand each have 17-30 nucleotides. In some instances, the sequence of the sense strand consists of the sequence set forth as SEQ ID NO: 5360 and the sequence of the antisense strand consists of the sequence set forth as SEQ ID NO: 5361. In some instances, the RNAi comprises one or more nucleotide modifications selected from the group consisting of LNA, HNA, CeNA, 2′-methoxyethyl, 2′-O-alkyl, 2′-O-allyl, 2′-C-allyl, 2′-fluoro, 2′-deoxy. In some instances, the nucleotides are modified with either 2′-OCH3 or 2′-F. In some instances, the RNAi further comprises at least one ligand. In some instances, the RNAi comprises one or more nucleotide modifications selected from the group consisting of 2′-O-methyl nucleotide, 2′-deoxyfluoro nucleotide, 2′-O—N-methylacetamido (2′-O-NMA) nucleotide, a 2′-O-dimethylaminoethoxyethyl (2′-O-DMAEOE) nucleotide, 2′-O-aminopropyl (2′-O-AP) nucleotide, 2′-ara-F. In some instances, the RNAi comprises at least one phosphorothioate or methylphosphonate internucleotide linkage. In some instances, the antisense strand nucleotide at the 1 position of the 5′-end of the double-stranded region is selected from the group consisting of A, dA, dU, U, and dT. In some instances, the base pair at the 1 position of the 5′-end of the double-stranded region is an AU base pair.

[0028] In some embodiments, provided herein is an RNA interference (RNAi) agent capable of inhibiting the expression of a target gene, wherein the RNAi agent comprises a double-stranded RNA (dsRNA) comprising a sense strand and an antisense strand, each of the strands having 14 to 30 nucleotides, wherein the sense strand contains at least two motifs of three identical modifications on three consecutive nucleotides, a first of said sense strand motifs occurring at a cleavage site in the sense strand and a second of said sense strand motifs occurring at a different region of the sense strand that is separated from the first sense strand motif by at least one nucleotide; and wherein the antisense strand contains at least two motifs of three identical modifications on three consecutive nucleotides, a first of said antisense strand motifs occurring at or near the cleavage site in the antisense strand and a second of said antisense strand motifs occurring at a different region of the antisense strand that is separated from the first antisense strand motif by at least one nucleotide; wherein the modification in the first antisense strand motif is different than the modification in the second antisense strand motif. In some instances, at least one of the nucleotides occurring in the first sense strand motif forms a base pair with one of the nucleotides in the first antisense strand motif. In some instances, the duplex has 17-30 nucleotides. In some instances, the duplex has 17-19 nucleotides. In some instances, each strand has 17-23 nucleotides. In some instances, the modifications on the nucleotides are selected from the group consisting of LNA, HNA, CeNA, 2′-methoxyethyl, 2-O-alkyl, 2-O-allyl, 2′-C-allyl, 2′-fluoro, 2′-deoxy, and combinations thereof. In some instances, the modifications on the nucleotide are 2′-OCH3 or 2′-F. In some instances, the RNAi comprises a ligand attached to the 3′ end of the sense strand.

[0029] In some embodiments, provided herein is an RNA interference (RNAi) agent capable of inhibiting the expression of a target gene, wherein the RNAi agent comprises a double-stranded RNA (dsRNA) comprising a sense strand and an antisense strand, each of the strands having 14 to 30 nucleotides, wherein the sense strand contains at least one motif of three 2′-F modifications on three consecutive nucleotides, one of said motifs occurring at or near the cleavage site in the strand; and wherein the antisense strand contains at least one motif of three 2-O-methyl modifications on three consecutive nucleotides, one of said motifs occurring at or near the cleavage site.

[0030] In some aspects, it is desirable to overcome at least some problems of drug solubility, deposition and delivery of RNAi using the technologies and strategies that have been employed to deliver active pharmaceutical ingredients to the nasal cavity. In some embodiments, an oligonucleotide described herein conjugated with cholesterol or lipid containing >18 carbon atoms administered to nasal epithelium increases residence time with tissue and increases intracellular delivery resulting in mRNA reduction, as compared to an unconjugated oligonucleotide. In some embodiments, an oligonucleotide is administered to nasal epithelium in a solution that is hypotonic.

[0031] In some embodiments, a small molecule inhibitor of lipoxygenase 15 is formulated with a cyclodextrin and administered to nasal epithelial tissue. In some embodiments, a small molecule inhibitor of lipoxygenase 15 is formulated with a surfactant and administered to nasal epithelial tissue.

[0032] In some embodiments, an agent for decreasing lipoxygenase expression or activity is administered using an aerosol spray device. In some embodiments, an agent for decreasing lipoxygenase expression or activity is formulated as powder and administered using a using a powder delivery device.

### BRIEF DESCRIPTION OF THE DRAWINGS

[0033] The novel features described herein are set forth with particularity in the appended claims. A better understanding of the features and advantages of the present invention will be obtained by reference to the following detailed description that sets forth illustrative embodiments and the accompanying drawings of which:

[0034] FIG. 1 is a pathway diagram showing the metabolism of arachidonic acid and other polyunsaturated fatty acid substrates. Figure reproduced from Cornejo-Garcia, et al., 2012, Clin. & Exp. Allergy 42: 1772-81.

[0035] FIG. 2 shows data indicating ablation of ALOX15 activity for T560M. Figure reproduced from Horn, et al., 2013, Redox Biol. 1:566-77.

[0036] FIG. 3 shows data indicating a new ALOX15 variant associated with airway diseases is an expression quantitative trait locus for ALOX15. The data was obtained from the GTEx Portal.

[0037] FIG. 4 is a table showing expression of ALOX15 in nasal polyps. Figure reproduced from Rostkowska, et al., 2011 Auris Nasus Larynx 38(1):58-64.

[0038] FIG. 5 shows data indicating activity of ALOX15 in nasal polyps tissue. Figure reproduced from Smith et al., Int. Arch. Allergy Appl. Immunol. 82(1):83-8.

[0039] FIG. 6 is a clinical pathology image showing increased expression of ALOX15 in eosinophilic asthma. Figure reproduced from Chu et al., 2002 Nov, Clin Exp Allergy 32(11):1558-65.

[0040] FIG. 7 is a Manhattan plot showing that about 20 genomic loci that were significantly associated with diagnosis of nasal polyps.

[0041] FIGS. 8A and 8B show the levels of ALOX15 mRNA (FIG. 8A) and 15(S)-HETE (FIG. 8B) in A549 cells following administration of ALOX15 siRNA.

### DETAILED DESCRIPTION

[0042] The concept that chronic inflammation commonly affects both the upper and lower airways via similar mechanisms is now well established. Clinically, chronic airway inflammation often presents as allergic rhinitis (AR), non-allergic rhinitis (NAR) and chronic rhinosinusitis (CRS) in the upper airway, and as asthma, COPD and the asthma-COPD overlap syndrome (ACOS) in the lower airway. These observations have fostered increasingly strong support for the so-called unified airway hypothesis. The airway is a continuous structure lined with ciliated, pseudostratified columnar epithelium that extends from the nasal vestibule to the distal bronchioles. Its mucosal surface is constantly exposed to environmental insults and is thus highly adapted in its role as the first line of defense, instigated by the innate and adaptive arms of the immune system. Though these diseases are heterogeneous in terms of their presentation and disease course, comprising many endotypes, they all share a common endotype with patients displaying a Th2-dominant response characterized by airway inflammation with local and/or systemic eosinophilia, among other features. The epidemiological and pathophysiological observations have resulted in the established dogma that the eosinophilic endotypes of airway diseases benefit from similar therapeutic approaches, revolving around modulation of the dysregulated innate, adaptive and inflammatory responses that are characteristic of these diseases.

[0043] Applicants evaluated approximately 24,000,000 imputed and directly genotyped variants in ˜400,000 individuals for associations with a range of chronic airway diseases in which eosinophilic endotypes are prevalent and with blood eosinophil counts. As described herein in Example 1, about 20 genomic loci were determined to be significantly associated with diagnosis of nasal polyps (see FIG. 7).

[0044] One cluster of association was at chromosome 17p13.2, encompassing the ALOX15 gene. The most significantly associated variant (rs34210653) at this locus was a low frequency missense variant (minor allele frequency ˜1.7%) in exon 13 of the ALOX15 gene which was consistently associated with the evaluated phenotypes (see Example 1). This variant was associated with reduced risk of nasal polyps; carriers of the minor allele of this variant had less than half the risk of nasal polyps as non-carriers (p=2×10\hat{ }−15; OR=0.38). This variant was also associated with reduced risk of chronic rhinosinusitis (p=7×10\hat{ }−12; OR=0.65), allergic rhinitis (p=5×10\hat{ }−9; OR=0.80), asthma (p=9×10\hat{ }−6; OR=0.93) and reduced risk of undergoing sinus surgery including nasal polypectomy (p=5×10\hat{ }−11; OR=0.46); This variant was also associated with reduced blood eosinophil counts (p=2×10\hat{ }−65; beta=−0.02).

[0045] ALOX15 is one of five (ALOX5/12/12B/15/15B) human lipoxygenases and is involved in the metabolism of arachidonic acid and other polyunsaturated fatty acid substrates (FIG. 1). 15-HETE is its major arachidonic acid-derived metabolite, which is then further metabolized to eoxins, 5-oxo-15-hydroxy-ETE and other metabolites. ALOX15 metabolites are largely pro-inflammatory and have been shown to induce airway epithelial injury and promote goblet cell hyperplasia/mucus hypersecretion (15-HETE), increase vascular permeability (eoxin C4) and are potent eosinophil chemoattractants (5-oxo-15-hydroxy-ETE). ALOX15 is highly expressed in the airway and is induced in vitro by IL-13, a central mediator of the Th2 response.

[0046] The rs34210653 variant results in a threonine to methionine change at amino acid 560 (T560M). Reports demonstrate that this T560M exchange results in near complete ablation of ALOX15 catalytic activity (FIG. 2), as measured by 15-HETE production from arachidonic acid (PMIDs: 17959182, 24282679, 21558275).

[0047] By inference, these data indicate that loss of function of ALOX15 protects against the development of nasal polyps, chronic rhinosinusitis, allergic rhinitis and asthma and strongly suggest therapeutic inhibition of ALOX15 as a novel, genetically-informed method of treatment for these diseases.

[0048] In addition to the protective LOF variant outlined above, Applicants discovered that a separate, independent ALOX15 variant is associated with risk of these diseases. This variant, rs2255888, is an ALOX15 regulatory variant that is associated with increased expression of ALOX15 in whole blood (see Example 1, FIG. 3).

[0049] In an analysis conditioning on the LOF variant, the T allele of rs2255888, which is associated with increased expression of ALOX15 in whole blood, is associated with increased risk of nasal polyps (p=7×10\hat{ }−5; OR=1.2) and increased blood eosinophil counts (p=2×10\hat{ }−22; beta=0.004). In combination with the T560M loss of function variant, Applicants have therefore identified an ALOX15 allelic series that modulates risk for nasal polyps and blood eosinophils. This allelic series consist of an ALOX15 loss of function variant (rs34210653) that is associated with decreased risk of nasal polyps, chronic rhinosinusitis, allergic rhinitis, asthma and decreased blood eosinophil counts, and an ALOX15 regulatory variant that increases ALOX15 expression (rs2255888) that is associated with increased risk of nasal polyps and increased blood eosinophil counts, further suggesting therapeutic inhibition of ALOX15 as a novel, genetically-informed method of treatment of nasal polyps and related eosinophilic diseases of the airway.

[0050] Applicants also identified three additional rare variants with evidence for being protein truncating or damaging to the protein and analyzed them collectively in a gene burden test (see Example 1). In aggregate these variants are associated with decreased risk of nasal polyps (p=0.0008; OR=0.53) and decreased blood eosinophil counts (p=1.4×10\hat{ }−9; beta=−0.016).

[0051] In the context of these novel genetic findings, it is notable that previous expression studies have found that ALOX15 is highly expressed in airway epithelial cells, eosinophils and particularly in nasal polyps tissue. Both expression (FIG. 4) and activity (FIG. 5) of ALOX15 are ˜30 times greater in nasal polyps tissue than in normal mucosa. ALOX15 expression is also increased in lung granulocytes and bronchial biopsies of asthmatic patients (FIG. 6), and in bronchial biopsies of patients with COPD. Together with Applicants' genetic findings, these data very strongly suggest that ALOX15 inhibition will have therapeutic benefit in the treatment of nasal polyps and related eosinophilic diseases of the airway.

[0052] Applicants propose that therapies designed to inhibit the production of ALOX15 protein delivered locally to the nasal epithelium, via inhalation or systemically, will be efficacious in treating nasal polyposis and related disorders of the upper and lower airway, including chronic rhinosinusitis, asthma, allergic rhinitis and NSAID-exacerbated respiratory disease. Our therapeutic mechanism utilizes RNA interference (RNAi) approaches designed to inhibit translation of or degrade ALOX15 mRNA. The RNAi based therapeutic modalities include siRNA targeting of ALOX15 resulting in RISC mediated mRNA cleavage and exonuclease degradation, or miRNA targeting resulting in inhibition of translation and/or degradation by exonucleases.

[0053] Provided herein are double-stranded RNAi (dsRNA) agents capable of inhibiting the expression of ALOX15. The dsRNA (dsRNA) agents, in some embodiments, are small interfering RNAs (siRNAs). dsRNA agents as described herein may comprise therapeutic use. For example, dsRNA agents are used for the treatment of various diseases involving ALOX-15 gene products.

[0054] The dsRNA agent, in some embodiments, comprises a sense strand and an antisense strand. Each strand of the dsRNA agent can range from 12-30 nucleotides in length. For example, each strand can be between 14-30 nucleotides in length, 17-30 nucleotides in length, 25-30 nucleotides in length, 27-30 nucleotides in length, 17-23 nucleotides in length, 17-21 nucleotides in length, 17-19 nucleotides in length, 19-25 nucleotides in length, 19-23 nucleotides in length, 19-21 nucleotides in length, 21-25 nucleotides in length, or 21-23 nucleotides in length. In some embodiments, each strand is from about 10 to about 50 nucleotides in length. In some instances, each strand is from about 10 to about 30, from about 15 to about 30, from about 18 to about 25, form about 18 to about 24, from about 19 to about 23, or from about 20 to about 22 nucleotides in length. In some embodiments, each strand is about 50 nucleotides in length. In some instances, each strand is about 45 nucleotides in length. In some instances, each strand is about 40 nucleotides in length. In some instances, each strand is about 35 nucleotides in length. In some instances, each strand is about 30 nucleotides in length. In some instances, each strand is about 25 nucleotides in length. In some instances, each strand is about 21 nucleotides in length. In some instances, each strand is about 20 nucleotides in length. In some instances, each strand is about 19 nucleotides in length. In some instances, each strand is about 18 nucleotides in length. In some instances, each strand is about 17 nucleotides in length. In some instances, each strand is about 16 nucleotides in length. In some instances, each strand is about 15 nucleotides in length. In some instances, each strand is about 14 nucleotides in length. In some instances, each strand is about 13 nucleotides in length. In some instances, each strand is about 12 nucleotides in length. In some instances, each strand is about 11 nucleotides in length. In some instances, each strand is about 10 nucleotides in length. In some instances, each strand is between about 10 and about 50 nucleotides in length. In some instances, each strand is between about 10 and about 45 nucleotides in length. In some instances, each strand is between about 10 and about 40 nucleotides in length. In some instances, each strand is between about 10 and about 35 nucleotides in length. In some instances, each strand is between about 10 and about 30 nucleotides in length. In some instances, each strand is between about 10 and about 25 nucleotides in length. In some instances, each strand is between about 10 and about 20 nucleotides in length. In some instances, each strand is between about 15 and about 25 nucleotides in length. In some instances, each strand is between about 15 and about 30 nucleotides in length. In some instances, each strand is between about 12 and about 30 nucleotides in length.

[0055] The sense strand and antisense strand typically form a duplex dsRNA. The duplex region of a dsRNA agent may be 12-30 nucleotide pairs in length. For example, the duplex region can be between 14-30 nucleotide pairs in length, 17-30 nucleotide pairs in length, 25-30 nucleotides in length, 27-30 nucleotide pairs in length, 17-23 nucleotide pairs in length, 17-21 nucleotide pairs in length, 17-19 nucleotide pairs in length, 19-25 nucleotide pairs in length, 19-23 nucleotide pairs in length, 19-21 nucleotide pairs in length, 21-25 nucleotide pairs in length, or 21-23 nucleotide pairs in length. In some embodiments, the duplex region is selected from 15, 16, 17, 18, 19, 20, 21, 22, 23, 24, 25, 26, and 27. In some embodiments, the duplex region is from about 10 to about 50 nucleotides in length. In some instances, the duplex region is from about 10 to about 30, from about 15 to about 30, from about 18 to about 25, form about 18 to about 24, from about 19 to about 23, or from about 20 to about 22 nucleotides in length. In some embodiments, the duplex region is about 50 nucleotides in length. In some instances, the duplex region is about 45 nucleotides in length. In some instances, the duplex region is about 40 nucleotides in length. In some instances, the duplex region is about 35 nucleotides in length. In some instances, the duplex region is about 30 nucleotides in length. In some instances, the duplex region is about 25 nucleotides in length. In some instances, the duplex region is about 21 nucleotides in length. In some instances, the duplex region is about 20 nucleotides in length. In some instances, the duplex region is about 19 nucleotides in length. In some instances, the duplex region is about 18 nucleotides in length. In some instances, the duplex region is about 17 nucleotides in length. In some instances, the duplex region is about 16 nucleotides in length. In some instances, the duplex region is about 15 nucleotides in length. In some instances, the duplex region is about 14 nucleotides in length. In some instances, the duplex region is about 13 nucleotides in length. In some instances, the duplex region is about 12 nucleotides in length. In some instances, the duplex region is about 11 nucleotides in length. In some instances, the duplex region is about 10 nucleotides in length. In some instances, the duplex region is between about 10 and about 50 nucleotides in length. In some instances, the duplex region is between about 10 and about 45 nucleotides in length. In some instances, the duplex region is between about 10 and about 40 nucleotides in length. In some instances, the duplex region is between about 10 and about 35 nucleotides in length. In some instances, the duplex region is between about 10 and about 30 nucleotides in length. In some instances, the duplex region is between about 10 and about 25 nucleotides in length. In some instances, the duplex region is between about 10 and about 20 nucleotides in length. In some instances, the duplex region is between about 15 and about 25 nucleotides in length. In some instances, the duplex region is between about 15 and about 30 nucleotides in length. In some instances, the duplex region is between about 12 and about 30 nucleotides in length.

[0056] In some embodiments, the dsRNA agent described herein comprises one or more overhang regions and/or capping groups of dsRNA agent at the 3′-end, or 5′-end or both ends of a strand. The overhang can be 1-6 nucleotides in length, for instance 2-6 nucleotides in length, 1-5 nucleotides in length, 2-5 nucleotides in length, 1-4 nucleotides in length, 2-4 nucleotides in length, 1-3 nucleotides in length, 2-3 nucleotides in length, or 1-2 nucleotides in length. The overhangs can be the result of one strand being longer than the other, or the result of two strands of the same length being staggered. The overhang can form a mismatch with the target mRNA or it can be complementary to the gene sequences being targeted or can be other sequence. The first and second strands can also be joined, e.g., by additional bases to form a hairpin, or by other non-base linkers.

[0057] In some embodiments, the nucleotides in the overhang region of the dsRNA agent described herein can each independently be a modified or unmodified nucleotide including, but no limited to 2′-sugar modified, such as, 2-F 2′-Omethyl, thymidine (T), 2′-O-methoxyethyl-5-methyluridine (Teo), 2′-O-methoxyethyladenosine (Aeo), 2′-O-methoxyethyl-5-methylcytidine (m5Ceo), and any combinations thereof. For example, TT can be an overhang sequence for either end on either strand. The overhang can form a mismatch with the target mRNA or it can be complementary to the gene sequences being targeted or can be other sequence.

[0058] The 5′- or 3′-overhangs at the sense strand, antisense strand or both strands of the dsRNA agent described herein may be phosphorylated. In some embodiments, the overhang region contains two nucleotides having a phosphorothioate between the two nucleotides, where the two nucleotides can be the same or different. In some embodiments, the overhang is present at the 3′-end of the sense strand, antisense strand or both strands. In some embodiments, this 3′-overhang is present in the antisense strand. In some embodiments, this 3′-overhang is present in the sense strand.

[0059] Described herein are double-stranded RNAi (dsRNA) agents capable of inhibiting the expression of ALOX15. The dsRNA agent may comprise a sense strand and an antisense strand, each strand having 14 to 30 nucleotides.

### Nucleic Acids

[0060] In some aspects, described herein are dsRNA comprising a sense strand comprising at least about 80%, 85%, 90%, or 95% identity to any one of SEQ ID NOS: 5568-5971, and an antisense strand that is complementary to the sense strand. In some aspects, described herein are dsRNA comprising a sense strand comprising at least about 80%, 85%, 90%, or 95% identity to any one of SEQ ID NOS: 6000-6038, and an antisense strand that is complementary to the sense strand. In some aspects, described herein are dsRNA comprising a sense strand comprising at least about 80%, 85%, 90%, or 95% identity to any one of SEQ ID NOS: 6050-6074, and an antisense strand that is complementary to the sense strand. In some aspects, described herein are dsRNA comprising a sense strand comprising at least about 19 nucleotides of any one of SEQ ID NOS: 1-5349, and an antisense strand that is complementary to the sense strand. In some aspects, described herein are dsRNA comprising a sense strand comprising at least about 80%, 85%, 90%, or 95% identity to any one of SEQ ID NOS: 1-5349, and an antisense strand that is complementary to the sense strand. In some cases, complementarity of a sense strand and antisense strand means at least about 70%, 75%, 80%, 85%, 90%, or 95% of the nucleotides in each strand are capable of forming a base pair with the other strand. For instance, for dsRNA comprising 19 or 21 nucleotides, the sense strand and antisense strand are capable of forming at least about 15, 16, 17, 18, or 19 base pairs. In some embodiments, the sense strand comprises one or more sequences selected from SEQ ID NOS: 23, 31, 33, 37, 39, 41, 43, 51, 195, 197, 199, 251, 257, 263, 273, 275, 279, 2389, 2391, 2397, 2399, 2409, 2415, 2419, 2421, 2423, 2425, 2427, 2431, 2437, 2439, 2769, 2771, 2773, 2881, 2899, 2903, 2905, 2909, 2913, 2915, 3013, 3015, 3017, 3019, 3027, 3029, 3037, 3039, 3041, 3047, 3053, 3055, 3063, 3065, 3183, 3231, 3233, 3243, 3439, 3443, 3449, 3457, 3461, 3463, 3573, 3703, 3705, 3875, 3889, 3981, 4089, 4265, 4321, 4339, 4347, 4507, 53, 2627, 2629, 3355, 3365, 87, 2329, 2379, 2381, 2521, 2525, 2607, 3057, 3061, 3067, 3501, 3503, 3873, 4179, 5568-5668, 5770-5870. In some embodiments, the antisense strand comprises one or more sequences selected from SEQ ID NOS: 24, 32, 34, 38, 40, 42, 44, 52, 196, 198, 200, 252, 258, 264, 274, 276, 280, 2390, 2392, 2398, 2400, 2410, 2416, 2420, 2422, 2424, 2426, 2428, 2432, 2438, 2440, 2770, 2772, 2774, 2882, 2900, 2904, 2906, 2910, 2914, 2916, 3014, 3016, 3018, 3020, 3028, 3030, 3038, 3040, 3042, 3048, 3054, 3056, 3064, 3066, 3184, 3232, 3234, 3244, 3440, 3444, 3450, 3458, 3462, 3464, 3574, 3704, 3706, 3876, 3890, 3982, 4090, 4266, 4322, 4340, 4348, 4508, 54, 2628, 2630, 3356, 3366, 88, 2330, 2380, 2382, 2522, 2526, 2608, 3058, 3062, 3068, 3502, 3504, 3874, 4180, 5669-5769, 5871-5971. An exemplary dsRNA comprises SEQ ID NOS: 5770 and 5871. Another exemplary dsRNA comprises SEQ ID NOS: 5771 and 5872. Another exemplary dsRNA comprises SEQ ID NOS: 5772 and 5873. Another exemplary dsRNA comprises SEQ ID NOS: 5773 and 5874. Another exemplary dsRNA comprises SEQ ID NOS: 5774 and 5875. Another exemplary dsRNA comprises SEQ ID NOS: 5775 and 5876. Another exemplary dsRNA comprises SEQ ID NOS: 5776 and 5877. Another exemplary dsRNA comprises SEQ ID NOS: 5777 and 5878. Another exemplary dsRNA comprises SEQ ID NOS: 5778 and 5879. Another exemplary dsRNA comprises SEQ ID NOS: 5779 and 5880. Another exemplary dsRNA comprises SEQ ID NOS: 5780 and 5881. Another exemplary dsRNA comprises SEQ ID NOS: 5781 and 5882. Another exemplary dsRNA comprises SEQ ID NOS: 5782 and 5883. Another exemplary dsRNA comprises SEQ ID NOS: 5783 and 5884. Another exemplary dsRNA comprises SEQ ID NOS: 5784 and 5885. Another exemplary dsRNA comprises SEQ ID NOS: 5785 and 5886. Another exemplary dsRNA comprises SEQ ID NOS: 5786 and 5887. Another exemplary dsRNA comprises SEQ ID NOS: 5787 and 5888. Another exemplary dsRNA comprises SEQ ID NOS: 5788 and 5889. Another exemplary dsRNA comprises SEQ ID NOS: 5789 and 5890. Another exemplary dsRNA comprises SEQ ID NOS: 5790 and 5891. Another exemplary dsRNA comprises SEQ ID NOS: 5791 and 5892. Another exemplary dsRNA comprises SEQ ID NOS: 5792 and 5893. Another exemplary dsRNA comprises SEQ ID NOS: 5793 and 5894. Another exemplary dsRNA comprises SEQ ID NOS: 5794 and 5895. Another exemplary dsRNA comprises SEQ ID NOS: 5795 and 5896. Another exemplary dsRNA comprises SEQ ID NOS: 5796 and 5897. Another exemplary dsRNA comprises SEQ ID NOS: 5797 and 5898. Another exemplary dsRNA comprises SEQ ID NOS: 5798 and 5899. Another exemplary dsRNA comprises SEQ ID NOS: 5799 and 5900. Another exemplary dsRNA comprises SEQ ID NOS: 5800 and 5901. Another exemplary dsRNA comprises SEQ ID NOS: 5801 and 5902. Another exemplary dsRNA comprises SEQ ID NOS: 5802 and 5903. Another exemplary dsRNA comprises SEQ ID NOS: 5803 and 5904. Another exemplary dsRNA comprises SEQ ID NOS: 5804 and 5905. Another exemplary dsRNA comprises SEQ ID NOS: 5805 and 5906. Another exemplary dsRNA comprises SEQ ID NOS: 5806 and 5907. Another exemplary dsRNA comprises SEQ ID NOS: 5807 and 5908. Another exemplary dsRNA comprises SEQ ID NOS: 5808 and 5909. Another exemplary dsRNA comprises SEQ ID NOS: 5809 and 5910. Another exemplary dsRNA comprises SEQ ID NOS: 5810 and 5911. Another exemplary dsRNA comprises SEQ ID NOS: 5811 and 5912. Another exemplary dsRNA comprises SEQ ID NOS: 5812 and 5913. Another exemplary dsRNA comprises SEQ ID NOS: 5813 and 5914. Another exemplary dsRNA comprises SEQ ID NOS: 5814 and 5915. Another exemplary dsRNA comprises SEQ ID NOS: 5815 and 5916. Another exemplary dsRNA comprises SEQ ID NOS: 5816 and 5917. Another exemplary dsRNA comprises SEQ ID NOS: 5817 and 5918. Another exemplary dsRNA comprises SEQ ID NOS: 5818 and 5919. Another exemplary dsRNA comprises SEQ ID NOS: 5819 and 5920. Another exemplary dsRNA comprises SEQ ID NOS: 5820 and 5921. Another exemplary dsRNA comprises SEQ ID NOS: 5821 and 5922. Another exemplary dsRNA comprises SEQ ID NOS: 5822 and 5923. Another exemplary dsRNA comprises SEQ ID NOS: 5823 and 5924. Another exemplary dsRNA comprises SEQ ID NOS: 5824 and 5925. Another exemplary dsRNA comprises SEQ ID NOS: 5825 and 5926. Another exemplary dsRNA comprises SEQ ID NOS: 5826 and 5927. Another exemplary dsRNA comprises SEQ ID NOS: 5827 and 5928. Another exemplary dsRNA comprises SEQ ID NOS: 5828 and 5929. Another exemplary dsRNA comprises SEQ ID NOS: 5829 and 5930. Another exemplary dsRNA comprises SEQ ID NOS: 5830 and 5931. Another exemplary dsRNA comprises SEQ ID NOS: 5831 and 5932. Another exemplary dsRNA comprises SEQ ID NOS: 5832 and 5933. Another exemplary dsRNA comprises SEQ ID NOS: 5833 and 5934. Another exemplary dsRNA comprises SEQ ID NOS: 5834 and 5935. Another exemplary dsRNA comprises SEQ ID NOS: 5835 and 5936. Another exemplary dsRNA comprises SEQ ID NOS: 5836 and 5937. Another exemplary dsRNA comprises SEQ ID NOS: 5837 and 5938. Another exemplary dsRNA comprises SEQ ID NOS: 5838 and 5939. Another exemplary dsRNA comprises SEQ ID NOS: 5839 and 5940. Another exemplary dsRNA comprises SEQ ID NOS: 5840 and 5941. Another exemplary dsRNA comprises SEQ ID NOS: 5841 and 5942. Another exemplary dsRNA comprises SEQ ID NOS: 5842 and 5943. Another exemplary dsRNA comprises SEQ ID NOS: 5843 and 5944. Another exemplary dsRNA comprises SEQ ID NOS: 5844 and 5945. Another exemplary dsRNA comprises SEQ ID NOS: 5845 and 5946. Another exemplary dsRNA comprises SEQ ID NOS: 5846 and 5947. Another exemplary dsRNA comprises SEQ ID NOS: 5847 and 5948. Another exemplary dsRNA comprises SEQ ID NOS: 5848 and 5949. Another exemplary dsRNA comprises SEQ ID NOS: 5849 and 5950. Another exemplary dsRNA comprises SEQ ID NOS: 5850 and 5951. Another exemplary dsRNA comprises SEQ ID NOS: 5851 and 5952. Another exemplary dsRNA comprises SEQ ID NOS: 5852 and 5953. Another exemplary dsRNA comprises SEQ ID NOS: 5853 and 5954. Another exemplary dsRNA comprises SEQ ID NOS: 5854 and 5955. Another exemplary dsRNA comprises SEQ ID NOS: 5855 and 5956. Another exemplary dsRNA comprises SEQ ID NOS: 5856 and 5957. Another exemplary dsRNA comprises SEQ ID NOS: 5857 and 5958. Another exemplary dsRNA comprises SEQ ID NOS: 5858 and 5959. Another exemplary dsRNA comprises SEQ ID NOS: 5859 and 5960. Another exemplary dsRNA comprises SEQ ID NOS: 5860 and 5961. Another exemplary dsRNA comprises SEQ ID NOS: 5861 and 5962. Another exemplary dsRNA comprises SEQ ID NOS: 5862 and 5963. Another exemplary dsRNA comprises SEQ ID NOS: 5863 and 5964. Another exemplary dsRNA comprises SEQ ID NOS: 5864 and 5965. Another exemplary dsRNA comprises SEQ ID NOS: 5865 and 5966. Another exemplary dsRNA comprises SEQ ID NOS: 5866 and 5967. Another exemplary dsRNA comprises SEQ ID NOS: 5867 and 5968. Another exemplary dsRNA comprises SEQ ID NOS: 5868 and 5969. Another exemplary dsRNA comprises SEQ ID NOS: 5869 and 5970. Another exemplary dsRNA comprises SEQ ID NOS: 5870 and 5971. In some aspects, any of the dsRNA are modified, such as described elsewhere herein. Any of the dsRNA described herein may comprise a pattern, e.g., as described herein. For instance, the sense strand may comprise pattern 1S, 2S, 3S, 4S, or 5S. The antisense strand may comprise pattern 1AS, 2AS, 3AS, or 4AS.

[0061] In some aspects, described herein are nucleic acid sequences comprising Formula IA, IB, IIA, IIB, IIIA, IIIB, IVA, IVB, VA, VB, VIA, VIB, VIIA, VIIB, VIIIA, or VIIIB, or a combination thereof. In some aspects, a dsRNA described herein comprises a sense strand comprising a nucleic acid sequence of Formula IA. In some aspects, a dsRNA described herein comprises a sense strand comprising a nucleic acid sequence of Formula IIA. In some aspects, a dsRNA described herein comprises a sense strand comprising a nucleic acid sequence of Formula IIIA. In some aspects, a dsRNA described herein comprises a sense strand comprising a nucleic acid sequence of Formula IVA. In some aspects, a dsRNA described herein comprises a sense strand comprising a nucleic acid sequence of Formula VA. In some aspects, a dsRNA described herein comprises a sense strand comprising a nucleic acid sequence of Formula VIA. In some aspects, a dsRNA described herein comprises a sense strand comprising a nucleic acid sequence of Formula VIIA. In some aspects, a dsRNA described herein comprises a sense strand comprising a nucleic acid sequence of Formula VIIIA.

[0062] In some aspects, a dsRNA described herein comprises an antisense strand comprising a nucleic acid sequence of Formula IB. In some aspects, a dsRNA described herein comprises an antisense strand comprising a nucleic acid sequence of Formula IIB. In some aspects, a dsRNA described herein comprises an antisense strand comprising a nucleic acid sequence of Formula IIIB. In some aspects, a dsRNA described herein comprises an antisense strand comprising a nucleic acid sequence of Formula IVB. In some aspects, a dsRNA described herein comprises an antisense strand comprising a nucleic acid sequence of Formula VB. In some aspects, a dsRNA described herein comprises an antisense strand comprising a nucleic acid sequence of Formula VIB. In some aspects, a dsRNA described herein comprises an antisense strand comprising a nucleic acid sequence of Formula VIIB. In some aspects, a dsRNA described herein comprises an antisense strand comprising a nucleic acid sequence of Formula VIIIB.

[0063] Formula IA comprises 5′ Z1-U-Z2-G-Z3-U-C-Z4-A-U-U-Z5-L 3′, wherein Z1 represents 0, 3, 5, 11, or 13 nucleosides; Z2 represents 1 nucleoside; Z3 represents 0, 2, 5, 8, or 10 nucleosides; Z4 represents 0, 2, 3, 5, 8, or 11 nucleosides; Z5 represents 0 or 3 nucleosides; and L represents an optional lipid. In some embodiments, Z1 is 0 nucleosides. In some embodiments, Z1 is 3, 5, 11, or 13 nucleosides. In some embodiments, Z1 comprises UGGUG, CAGGU, CAGGUUUGCCACU (SEQ ID NO: 6007), GCACCUUUUCA (SEQ ID NO: 6008), or AGC, or a nucleic acid sequence thereof having about 1 or 2 nucleoside substitutions, additions, or deletions. In some embodiments, Z2 comprises C, G, or U. In some embodiments, Z3 is 0 nucleosides. In some embodiments, Z3 is 2, 5, 8, or 10 nucleosides. In some embodiments, Z3 comprises UG, UGUCGAGAGA (SEQ ID NO: 6009), AGAGA, AGAGA, CCACUUUG, or AGCCU, or a nucleic acid sequence thereof having about 1 or 2 nucleoside substitutions, additions, or deletions. In some embodiments, Z4 is 0 nucleosides. In some embodiments, Z4 is 2, 3, 5, 8, or 11 nucleosides. In some embodiments, Z4 comprises GAGAGAUCACU (SEQ ID NO: 6010), ACU, ACUGAAAU, UC, or CUAAC, or a nucleic acid sequence thereof having about 1 or 2 nucleoside substitutions, additions, or deletions. In some embodiments, Z5 represents 0 nucleosides. In some embodiments, Z5 represents 3 nucleosides. In some embodiments, Z5 comprises UUU, UUC, UUA, UUG, CUU, CUC, CUA, CUG, AUU, AUC, AUA, AUG, GUU, GUC, GUA, GUG, UCU, UCC, UCA, UCG, CCU, CCC, CCA, CCG, ACU, ACC, ACA, ACG, GCU, GCC, GCA, GCG, UAU, UAC, UAA, UAG, CAU, CAC, CAA, CAG, AAU, AAC, AAA, AAG, GAU, GAC, GAA, GAG, UGU, UGC, UGA, UGG, CGU, CGC, CGA, CGG, AGU, AGC, AGA, AGG, GGU, GGC, GGA, or GGG. In some embodiments, one or more of the Z5 nucleosides comprise a deoxyribose. The one or more may be one, two, or three. In some embodiments, Formula IA comprises the lipid. In some embodiments, the lipid comprises cholesterol, myristoyl, palmitoyl, stearoyl, lithocholoyl, docosanoyl, docosahexaenoyl, myristyl, palmityl stearyl, or α-tocopherol, or a combination thereof. In some embodiments, Z1-U-Z2-G-Z3-U-C-Z4 comprises UGGUGUCGAGAGAUCACU (SEQ ID NO: 6011), or a nucleic acid sequence thereof having about 1 or 2 nucleoside substitutions, additions, or deletions. In some embodiments, Z1-U-Z2-G-Z3-U-C-Z4 comprises UCGAGAGAUCACUGAAAU (SEQ ID NO: 6012), or a nucleic acid sequence thereof having about 1 or 2 nucleoside substitutions, additions, or deletions. In some embodiments, Z1-U-Z2-G-Z3-U-C-Z4 comprises CAGGUUUGCCACUUUGUC (SEQ ID NO: 6013), or a nucleic acid sequence thereof having about 1 or 2 nucleoside substitutions, additions, or deletions. In some embodiments, Z1-U-Z2-G-Z3-U-C-Z4 comprises GCACCUUUUCAUGGUCUC (SEQ ID NO: 6014), or a nucleic acid sequence thereof having about 1 or 2 nucleoside substitutions, additions, or deletions. In some embodiments, Z1-U-Z2-G-Z3-U-C-Z4 comprises AGCUGGAGCCUUCCUAAC (SEQ ID NO: 15), or a nucleic acid sequence thereof having about 1 or 2 nucleoside substitutions, additions, or deletions. In some embodiments, the Z1-U-Z2-G-Z3-U-C-Z4-A-U-U sequence of Formula 1A is twenty-one nucleosides in length. In some embodiments, the antisense strand comprises the reserve complement of Z1-U-Z2-G-Z3-U-C-Z4.

[0064] Formula IB comprises 5′ U-Z6-G-A-Z7-C-Z8-A-Z9-U-U 3′, wherein Z6 represents 0, 2, 3, 5, 8, or 11 nucleosides; Z7 represents 0, 2, 5, 8, or 10 nucleosides; Z8 represents 1 nucleoside; Z9 represents 0, 3, 5, 11, or 13 nucleosides; and each “-” is independently a phosphodiester or modified internucleoside linkage. In some embodiments, Z6 is 0 nucleosides. In some embodiments, Z6 is 0, 2, 3, 5, 8, or 11 nucleosides. In some embodiments, Z6 comprises AGU, AGUGAUCUCUC (SEQ ID NO: 6016), AUUUCAGU, GA, or GUUAG, or a nucleic acid sequence thereof having about 1 or 2 nucleoside substitutions, additions, or deletions. In some embodiments, Z7 is 0 nucleosides. In some embodiments, Z7 is 0, 2, 5, 8, or 10 nucleosides. In some embodiments, Z7 comprises UCUCU, CA, UCUCU, CAAAGUGG, GA, or AGGCU, or a nucleic acid sequence thereof having about 1 or 2 nucleoside substitutions, additions, or deletions. In some embodiments, Z8 comprises C, G, or A. In some embodiments, Z9 is 0 nucleosides. In some embodiments, Z9 is 3, 5, 11, or 13 nucleosides. In some embodiments, Z9 comprises CACCA, AGUGGCAAACCUG (SEQ ID NO: 6017), ACCUG, UGAAAAGGUGC (SEQ ID NO: 6018), or GCU, or a nucleic acid sequence thereof having about 1 or 2 nucleoside substitutions, additions, or deletions. In some embodiments, Z6-G-A-Z7-C-Z8-A-Z9 comprises AGUGAUCUCUCGACACCA (SEQ ID NO: 6019), or a nucleic acid sequence thereof having about 1 or 2 nucleoside substitutions, additions, or deletions. In some embodiments, Z6-G-A-Z7-C-Z8-A-Z9 comprises AUUUCAGUGAUCUCUCGA (SEQ ID NO: 6020), or a nucleic acid sequence thereof having about 1 or 2 nucleoside substitutions, additions, or deletions. In some embodiments, Z6-G-A-Z7-C-Z8-A-Z9 comprises GACAAAGUGGCAAACCUG (SEQ ID NO: 6021), or a nucleic acid sequence thereof having about 1 or 2 nucleoside substitutions, additions, or deletions. In some embodiments, Z6-G-A-Z7-C-Z8-A-Z9 comprises GAGACCAUGAAAAGGUGC (SEQ ID NO: 6022), or a nucleic acid sequence thereof having about 1 or 2 nucleoside substitutions, additions, or deletions. In some embodiments, Z6-G-A-Z7-C-Z8-A-Z9 comprises GUUAGGAAGGCUCCAGCU (SEQ ID NO: 6023), or a nucleic acid sequence thereof having about 1 or 2 nucleoside substitutions, additions, or deletions. In some embodiments, the U-Z6-G-A-Z7-C-Z8-A-Z9-U-U is 21 nucleosides in length.

[0065] Formula IIA comprises 5′ Z1-U-Z2-G-Z3-C-U-Z4-A-U-U-Z5-L 3′, wherein Z1 represents 0, 3, 5, or 11 nucleosides; Z2 represents 1 nucleoside; Z3 represents 1, 3, 7, 8, or 13 nucleosides; Z4 represents 0, 1, 3, 5, or 7 nucleosides; Z5 represents 0 or 3 nucleosides; and L comprises an optional lipid. In some cases, Z1 comprises UGGUG, CAGGU, GCACCUUUUCA (SEQ ID NO: 6008), or AGC, or a nucleic acid sequence thereof having about 1 or 2 nucleoside substitutions, additions, or deletions. In some cases, Z2 comprises G, C, or U. In some cases, Z3 comprises UGUCGAGAGAUCA (SEQ ID NO: 6024), AGAGAUCA, AGAGAUCA, CCA, U, AGC, or AGCCUUC, or a nucleic acid sequence thereof having about 1 or 2 nucleoside substitutions, additions, or deletions. In some cases, Z4 comprises GAAAU, UUGUC, C, UCCUAAC, or AAC, or a nucleic acid sequence thereof having about 1 or 2 nucleoside substitutions, additions, or deletions. In some embodiments, Z5 represents 0 nucleosides. In some embodiments, Z5 represents 3 nucleosides. In some embodiments, Z5 comprises UUU, UUC, UUA, UUG, CUU, CUC, CUA, CUG, AUU, AUC, AUA, AUG, GUU, GUC, GUA, GUG, UCU, UCC, UCA, UCG, CCU, CCC, CCA, CCG, ACU, ACC, ACA, ACG, GCU, GCC, GCA, GCG, UAU, UAC, UAA, UAG, CAU, CAC, CAA, CAG, AAU, AAC, AAA, AAG, GAU, GAC, GAA, GAG, UGU, UGC, UGA, UGG, CGU, CGC, CGA, CGG, AGU, AGC, AGA, AGG, GGU, GGC, GGA, or GGG. In some embodiments, one or more of the Z5 nucleosides comprise a deoxyribose. The one or more may be one, two, or three. In some embodiments, Formula IIA comprises the lipid. In some embodiments, the lipid comprises cholesterol, myristoyl, palmitoyl, stearoyl, lithocholoyl, docosanoyl, docosahexaenoyl, myristyl, palmityl stearyl, or α-tocopherol, or a combination thereof.

[0066] Formula IIB comprises 5′ U-Z6-A-G-Z7-C-Z8-A-Z9-U-U 3′, wherein Z6 represents 0, 1, 3, 5, or 7 nucleosides; Z7 represents 1, 3, 7, 8, or 13 nucleosides; Z8 represents 1 nucleoside; and Z9 represents 0, 3, 5, or 11 nucleosides. In some cases, Z6 comprises AUUUC, GACAA, G, GUU, or a nucleic acid sequence thereof having about 1 or 2 nucleoside substitutions, additions, or deletions. In some cases, Z7 comprises UGAUCUCU, UGAUCUCU, UGG, A, GAAGGCU, GCU, or a nucleic acid sequence thereof having about 1 or 2 nucleoside substitutions, additions, or deletions. In some cases, Z8 comprises G, C, or A. In some cases, Z9 comprises CACCA, ACCUG, UGAAAAGGUGC (SEQ ID NO: 6018), GCU, or a nucleic acid sequence thereof having about 1 or 2 nucleoside substitutions, additions, or deletions.

[0067] Formula IIIA comprises 5′ Z1-U-Z2-G-Z3-U-Z4-C-Z5-A-U-U-Z6-L 3′, wherein Z1 represents 0, 3, 5, or 11 nucleosides; Z2 represents 1 nucleoside; Z3 represents 0, 4, 5, 6, 8, or 10 nucleosides; Z4 represents 2 nucleosides; Z5 represents 1, 4, 6, or 11 nucleosides; Z6 represents 0 or 3 nucleosides; and L comprises an optional lipid. In some cases, Z1 comprises UGGUG, CAGGU, GCACCUUUUCA (SEQ ID NO: 6008), AGC, or a nucleic acid sequence thereof having about 1 or 2 nucleoside substitutions, additions, or deletions. In some cases, Z2 comprises G, C, or U. In some cases, Z3 comprises UGUCGAGAGA (SEQ ID NO: 6009), AGAGA, CCACUU, AGCC, AGCCUUCC, or a nucleic acid sequence thereof having about 1 or 2 nucleoside substitutions, additions, or deletions. In some cases, Z4 comprises GU, CA, CU, UC, or AA. In some cases, Z5 comprises GAGAGAUCACU (SEQ ID NO: 6010), U, UGAAAU, UAAC, or a nucleic acid sequence thereof having about 1 or 2 nucleoside substitutions, additions, or deletions. In some embodiments, Z6 represents 0 nucleosides. In some embodiments, Z5 represents 3 nucleosides. In some embodiments, Z6 comprises UUU, UUC, UUA, UUG, CUU, CUC, CUA, CUG, AUU, AUC, AUA, AUG, GUU, GUC, GUA, GUG, UCU, UCC, UCA, UCG, CCU, CCC, CCA, CCG, ACU, ACC, ACA, ACG, GCU, GCC, GCA, GCG, UAU, UAC, UAA, UAG, CAU, CAC, CAA, CAG, AAU, AAC, AAA, AAG, GAU, GAC, GAA, GAG, UGU, UGC, UGA, UGG, CGU, CGC, CGA, CGG, AGU, AGC, AGA, AGG, GGU, GGC, GGA, or GGG. In some embodiments, one or more of the Z6 nucleosides comprise a deoxyribose. The one or more may be one, two, or three. In some embodiments, Formula IIIA comprises the lipid. In some embodiments, the lipid comprises cholesterol, myristoyl, palmitoyl, stearoyl, lithocholoyl, docosanoyl, docosahexaenoyl, myristyl, palmityl stearyl, or α-tocopherol, or a combination thereof.

[0068] Formula IIIB comprises 5′ U-Z7-G-Z8-A-Z9-C-Z10-A-Z11-U-U 3′, wherein Z7 represents 0, 1, 4, 6, or 11 nucleosides; Z8 represents 2 nucleosides; Z9 represents 0, 4, 5, 6, 8 or 10 nucleosides; Z10 represents 1 nucleoside; and Z11 represents 0, 3, 5, or 11 nucleosides. In some cases, Z7 comprises A, AGUGAUCUCUC (SEQ ID NO: 6016), AUUUCA, GUUA, or a nucleic acid sequence thereof having about 1 or 2 nucleoside substitutions, additions, or deletions. In some cases, Z8 comprises UG, AC, AG, UU, or GA. In some cases, Z9 comprises UCUCU, UCUCUCGACA (SEQ ID NO: 6025), UCUCU, AAGUGG, GGAAGGCU, or GGCU or a nucleic acid sequence thereof having about 1 or 2 nucleoside substitutions, additions, or deletions. In some cases, Z10 comprises G, C, or A. In some cases, Z11 comprises CACCA, ACCUG, UGAAAAGGUGC (SEQ ID NO: 6018), GCU, or a nucleic acid sequence thereof having about 1 or 2 nucleoside substitutions, additions, or deletions.

[0069] Formula IVA comprises 5′ Z1-G-Z2-U-Z3-C-U-Z4-A-U-U-Z5-L 3′, wherein Z1 represents 1, 2, 3, 6, 11, or 12 nucleosides; Z2 represents 1 nucleoside; Z3 represents 0, 2, 5, 6, 9, or 12 nucleosides; Z4 represents 0, 1, 3, or 5 nucleosides; Z5 represents 0 or 3 nucleosides; and L comprises an optional lipid. In some cases, Z1 comprises U, UGGUGUCGAGA (SEQ ID NO: 6026), UCGAGA, CA, A, GCACCUUUUCAU (SEQ ID NO: 6027), or a nucleic acid sequence thereof having about 1 or 2 nucleoside substitutions, additions, or deletions. In some cases, Z2 comprises G, C, A, or U. In some cases, Z3 comprises GUCGAGAGAUCA (SEQ ID NO: 6028), CA, UGCCA, GGAGC, GGAGCCUUC, or a nucleic acid sequence thereof having about 1 or 2 nucleoside substitutions, additions, or deletions. In some cases, Z4 comprises GAAAU, UUGUC, C, UCCUAAC, or AAC, or a nucleic acid sequence thereof having about 1 or 2 nucleoside substitutions, additions, or deletions. In some embodiments, Z5 represents 0 nucleosides. In some embodiments, Z5 represents 3 nucleosides. In some embodiments, Z5 comprises UUU, UUC, UUA, UUG, CUU, CUC, CUA, CUG, AUU, AUC, AUA, AUG, GUU, GUC, GUA, GUG, UCU, UCC, UCA, UCG, CCU, CCC, CCA, CCG, ACU, ACC, ACA, ACG, GCU, GCC, GCA, GCG, UAU, UAC, UAA, UAG, CAU, CAC, CAA, CAG, AAU, AAC, AAA, AAG, GAU, GAC, GAA, GAG, UGU, UGC, UGA, UGG, CGU, CGC, CGA, CGG, AGU, AGC, AGA, AGG, GGU, GGC, GGA, or GGG. In some embodiments, one or more of the Z5 nucleosides comprise a deoxyribose. The one or more may be one, two, or three. In some embodiments, Formula IVA comprises the lipid. In some embodiments, the lipid comprises cholesterol, myristoyl, palmitoyl, stearoyl, lithocholoyl, docosanoyl, docosahexaenoyl, myristyl, palmityl stearyl, or α-tocopherol, or a combination thereof.

[0070] Formula IVB comprises 5′ U-Z6-A-G-Z7-A-Z8-C-Z9-U-U 3′, wherein Z6 represents 0, 1, 3, or 5 nucleosides; Z7 represents 0, 2, 5, 6, 9, or 12 nucleosides; Z8 represents 1 nucleoside; and Z9 represents 1, 2, 3, 6, 11, or 12 nucleosides. In some cases, Z6 comprises AUUUC, GACAA, A, GUU, GUUAGGA, or a nucleic acid sequence thereof having about 1 or 2 nucleoside substitutions, additions, or deletions. In some cases, Z7 comprises UG, UGAUCUCUCGAC (SEQ ID NO: 6029), UGGCA, GAAGGCUCC, GCUCC, UGGCAA, or a nucleic acid sequence thereof having about 1 or 2 nucleoside substitutions, additions, or deletions. In some cases, Z8 comprises U, G, C, or A. In some cases, Z9 comprises UCUCGACACCA (SEQ ID NO: 6030), A, UG, U, UCUCGA, AUGAAAAGGUGC (SEQ ID NO: 6031), or a nucleic acid sequence thereof having about 1 or 2 nucleoside substitutions, additions, or deletions.

[0071] Formula VA comprises 5′ Z1-C-Z2-G-Z3-U-C-Z4-A-U-U-Z5-L 3′, wherein Z1 represents 0, 1, 2, 6, or 9 nucleosides; Z2 represents 2 nucleosides; Z3 represents 1, 3, 5, or 12 nucleosides; Z4 represents 0, 2, 3, 5, 8 nucleosides; Z5 represents 0 or 3 nucleosides; and L comprises an optional lipid. In some cases, Z1 comprises UGGUGU, U, AG, or GCACCUUUU or a nucleic acid sequence thereof having about 1 or 2 nucleoside substitutions, additions, or deletions. In some cases, Z2 comprises GA, AG, AU, or UG. In some cases, Z3 comprises AGA, G, UUUGCCACUUUG (SEQ ID NO: 6032), AGCCU, or a nucleic acid sequence thereof having about 1 or 2 nucleoside substitutions, additions, or deletions. In some cases, Z4 comprises ACU, ACUGAAAU, UC, CUAAC, GUC, or a nucleic acid sequence thereof having about 1 or 2 nucleoside substitutions, additions, or deletions. In some embodiments, Z5 represents 0 nucleosides. In some embodiments, Z5 represents 3 nucleosides. In some embodiments, Z5 comprises UUU, UUC, UUA, UUG, CUU, CUC, CUA, CUG, AUU, AUC, AUA, AUG, GUU, GUC, GUA, GUG, UCU, UCC, UCA, UCG, CCU, CCC, CCA, CCG, ACU, ACC, ACA, ACG, GCU, GCC, GCA, GCG, UAU, UAC, UAA, UAG, CAU, CAC, CAA, CAG, AAU, AAC, AAA, AAG, GAU, GAC, GAA, GAG, UGU, UGC, UGA, UGG, CGU, CGC, CGA, CGG, AGU, AGC, AGA, AGG, GGU, GGC, GGA, or GGG. In some embodiments, one or more of the Z5 nucleosides comprise a deoxyribose. The one or more may be one, two, or three. In some embodiments, Formula VA comprises the lipid. In some embodiments, the lipid comprises cholesterol, myristoyl, palmitoyl, stearoyl, lithocholoyl, docosanoyl, docosahexaenoyl, myristyl, palmityl stearyl, or α-tocopherol, or a combination thereof.

[0072] Formula VB comprises 5′ U-Z6-G-A-Z7-C-Z8-G-Z9-U-U 3′, wherein Z6 represents 0, 2, 3, 5, or 8 nucleosides; Z7 represents 1, 3, 5, or 12 nucleosides; Z8 represents 2 nucleosides; and Z9 represents 0, 1, 2, 6, or 9 nucleosides. In some cases, Z6 comprises AGU, AUUUCAGU, GA, GUUAG, or a nucleic acid sequence thereof having about 1 or 2 nucleoside substitutions, additions, or deletions. In some cases, Z7 comprises UCU, C, CAAAGUGGCAAA (SEQ ID NO: 6033), AGGCU, or a nucleic acid sequence thereof having about 1 or 2 nucleoside substitutions, additions, or deletions. In some cases, Z8 comprises UC, CU, AU, or CA. In some cases, Z9 comprises ACACCA, A, AAAAGGUGC, or CU, or a nucleic acid sequence thereof having about 1 or 2 nucleoside substitutions, additions, or deletions.

[0073] Formula VIA comprises 5′ Z1-C-Z2-G-Z3-C-U-Z4-A-U-U-Z5-L 3′, wherein Z1 represents 0, 1, 2, 6, or 9 nucleosides; Z2 represents 2 nucleosides; Z3 represents 2, 3, 6, 7 nucleosides; Z4 represents 0, 1, 3, 5, or 7 nucleosides; Z5 represents 0 or 3 nucleosides; and L comprises an optional lipid. In some cases, Z1 comprises UGGUGU, U, AG, or GCACCUUUU or a nucleic acid sequence thereof having about 1 or 2 nucleoside substitutions, additions, or deletions. In some cases, Z2 comprises GA, AG, AU, or UG. In some cases, Z3 comprises AGAUCA, UUUGCCA, GU, AGC, or AGCCUUC, or a nucleic acid sequence thereof having about 1 or 2 nucleoside substitutions, additions, or deletions. In some cases, Z4 comprises GAAAU, UUGUC, C, AAC, or UCCUAAC, or a nucleic acid sequence thereof having about 1 or 2 nucleoside substitutions, additions, or deletions. In some embodiments, Z5 represents 0 nucleosides. In some embodiments, Z5 represents 3 nucleosides. In some embodiments, Z5 comprises UUU, UUC, UUA, UUG, CUU, CUC, CUA, CUG, AUU, AUC, AUA, AUG, GUU, GUC, GUA, GUG, UCU, UCC, UCA, UCG, CCU, CCC, CCA, CCG, ACU, ACC, ACA, ACG, GCU, GCC, GCA, GCG, UAU, UAC, UAA, UAG, CAU, CAC, CAA, CAG, AAU, AAC, AAA, AAG, GAU, GAC, GAA, GAG, UGU, UGC, UGA, UGG, CGU, CGC, CGA, CGG, AGU, AGC, AGA, AGG, GGU, GGC, GGA, or GGG. In some embodiments, one or more of the Z5 nucleosides comprise a deoxyribose. The one or more may be one, two, or three. In some embodiments, Formula VIA comprises the lipid. In some embodiments, the lipid comprises cholesterol, myristoyl, palmitoyl, stearoyl, lithocholoyl, docosanoyl, docosahexaenoyl, myristyl, palmityl stearyl, or α-tocopherol, or a combination thereof.

[0074] Formula VIB comprises 5′ U-Z6-A-G-Z7-C-Z8-G-Z9-U-U 3′, wherein Z6 represents 0, 1, 3, 5, or 7 nucleosides; Z7 represents 2, 3, 6, or 7 nucleosides; Z8 represents 2 nucleosides; and Z9 represents 0, 1, 2, 6, or 9 nucleosides. In some cases, Z6 comprises AUUUC, GACAA, G, GUU, or GUUAGGA or a nucleic acid sequence thereof having about 1 or 2 nucleoside substitutions, additions, or deletions. In some cases, Z7 comprises UGAUCU, AC, GAAGGCU, or GCU, or a nucleic acid sequence thereof having about 1 or 2 nucleoside substitutions, additions, or deletions. In some cases, Z8 comprises UC, CU, AU, or CA. In some cases, Z9 comprises ACACCA, A, CU, AAAAGGUGC, or a nucleic acid sequence thereof having about 1 or 2 nucleoside substitutions, additions, or deletions.

[0075] Formula VIIA comprises 5′ Z1-C-Z2-G-Z3-U-Z4-C-Z5-A-U-U-Z6-L 3′, wherein Z1 represents 0, 1, 2, 6, or 9 nucleosides; Z2 represents 2 nucleosides; Z3 represents 1, 2, 3, 4, 8, or 10 nucleosides; Z4 represents 2 nucleosides; Z5 represents 0, 1, 4, 6, 8, or 9 nucleosides; Z6 represents 0 or 3 nucleosides; and L comprises an optional lipid. In some cases, Z1 comprises UGGUGU, U, GCACCUUUU, AGCUGGAGCCUUCC (SEQ ID NO: 6034), CAGGUU, or AG, or a nucleic acid sequence thereof having about 1 or 2 nucleoside substitutions, additions, or deletions. In some cases, Z2 comprises GA, AG, AU, or UG. In some cases, Z3 comprises AGA, U, G, AGCC, UUUGCCACUU (SEQ ID NO: 6035), AGCCUUCC, or a nucleic acid sequence thereof having about 1 or 2 nucleoside substitutions, additions, or deletions. In some cases, Z4 comprises CA, UG, GC, GU, CU, UC, or AA. In some cases, Z5 comprises U, UGAAAU, ACUUUGUC, CACUUUGUC, UAAC, or a nucleic acid sequence thereof having about 1 or 2 nucleoside substitutions, additions, or deletions. In some embodiments, Z6 represents 0 nucleosides. In some embodiments, Z6 represents 3 nucleosides. In some embodiments, Z6 comprises UUU, UUC, UUA, UUG, CUU, CUC, CUA, CUG, AUU, AUC, AUA, AUG, GUU, GUC, GUA, GUG, UCU, UCC, UCA, UCG, CCU, CCC, CCA, CCG, ACU, ACC, ACA, ACG, GCU, GCC, GCA, GCG, UAU, UAC, UAA, UAG, CAU, CAC, CAA, CAG, AAU, AAC, AAA, AAG, GAU, GAC, GAA, GAG, UGU, UGC, UGA, UGG, CGU, CGC, CGA, CGG, AGU, AGC, AGA, AGG, GGU, GGC, GGA, or GGG. In some embodiments, one or more of the Z6 nucleosides comprise a deoxyribose. The one or more may be one, two, or three. In some embodiments, Formula VIIA comprises the lipid. In some embodiments, the lipid comprises cholesterol, myristoyl, palmitoyl, stearoyl, lithocholoyl, docosanoyl, docosahexaenoyl, myristyl, palmityl stearyl, or α-tocopherol, or a combination thereof.

[0076] Formula VIIB comprises 5′ U-Z7-G-Z8-A-Z9-C-Z10-G-Z11-U-U 3′, wherein Z7 represents 0, 1, 4, 6, 8, or 9 nucleosides; Z8 represents 2 nucleosides; Z9 represents 1, 2, 3, 4, 8, or 10 nucleosides; Z10 represents 2 nucleosides; and Z11 represents 0, 1, 2, 6, or 9 nucleosides. In some cases, Z7 comprises A, AUUUCA, GACAAAGU, GACAAAGUG, GUUA, or a nucleic acid sequence thereof having about 1 or 2 nucleoside substitutions, additions, or deletions. In some cases, Z8 comprises UG, GC, CA, AG, UU, or GA. In some cases, Z9 comprises UCU, A, AAGUGGCAAA (SEQ ID NO: 6036), C, GGCU, GGAAGGCU, or a nucleic acid sequence thereof having about 1 or 2 nucleoside substitutions, additions, or deletions. In some cases, Z10 comprises UC, CU, AU, or CA. In some cases, Z11 comprises ACACCA, A, CU, AAAAGGUGC, or a nucleic acid sequence thereof having about 1 or 2 nucleoside substitutions, additions, or deletions.

[0077] Formula VIIIA comprises 5′ Z1-A-Z2-U-Z3-C-U-Z4-A-U-U-Z5-L 3′, wherein Z1 represents 0, 1, 2, 5, or 10 nucleosides; Z2 represents 2 nucleosides; Z3 represents 2, 5, 6, or 9 nucleosides; Z4 represents 0, 1, 3, 5, or 7 nucleosides; Z5 represents 0 or 3 nucleosides; and L comprises an optional lipid. In some cases, Z1 comprises UGGUGUCGAG (SEQ ID NO: 6037), UCGAG, C, GC, or a nucleic acid sequence thereof having about 1 or 2 nucleoside substitutions, additions, or deletions. In some cases, Z2 comprises GA, GG, CC, or GC. In some cases, Z3 comprises CA, UUGCCA, UUUCAUGGU, GGAGC, GGAGCCUUC, or a nucleic acid sequence thereof having about 1 or 2 nucleoside substitutions, additions, or deletions. In some cases, Z4 comprises GAAAU, UUGUC, C, AAC, or UCCUAAC, or a nucleic acid sequence thereof having about 1 or 2 nucleoside substitutions, additions, or deletions. In some embodiments, Z5 represents 0 nucleosides. In some embodiments, Z5 represents 3 nucleosides. In some embodiments, Z5 comprises UUU, UUC, UUA, UUG, CUU, CUC, CUA, CUG, AUU, AUC, AUA, AUG, GUU, GUC, GUA, GUG, UCU, UCC, UCA, UCG, CCU, CCC, CCA, CCG, ACU, ACC, ACA, ACG, GCU, GCC, GCA, GCG, UAU, UAC, UAA, UAG, CAU, CAC, CAA, CAG, AAU, AAC, AAA, AAG, GAU, GAC, GAA, GAG, UGU, UGC, UGA, UGG, CGU, CGC, CGA, CGG, AGU, AGC, AGA, AGG, GGU, GGC, GGA, or GGG. In some embodiments, one or more of the Z5 nucleosides comprise a deoxyribose. The one or more may be one, two, or three. In some embodiments, Formula VIIIA comprises the lipid. In some embodiments, the lipid comprises cholesterol, myristoyl, palmitoyl, stearoyl, lithocholoyl, docosanoyl, docosahexaenoyl, myristyl, palmityl stearyl, or α-tocopherol, or a combination thereof.

[0078] Formula VIIIB comprises 5′ U-Z6-A-G-Z7-A-Z8-U-Z9-U-U 3′, wherein Z6 represents 0, 1, 3, 5, or 7 nucleosides; Z7 represents 2, 5, 6, or 9 nucleosides; Z8 represents 2 nucleosides; and Z9 represents 0, 1, 2, 5, or 10 nucleosides. In some cases, Z6 comprises AUUUC, GACAA, G, GUU, or GUUAGGA, or a nucleic acid sequence thereof having about 1 or 2 nucleoside substitutions, additions, or deletions. In some cases, Z7 comprises UG, UGGCAA, ACCAUGAAA, GAAGGCUCC, GCUCC, or a nucleic acid sequence thereof having about 1 or 2 nucleoside substitutions, additions, or deletions. In some cases, Z8 comprises UC, CC, GG, or GC. In some cases, Z9 comprises CUCGACACCA (SEQ ID NO: 6038), CUCGA, G, or GC or a nucleic acid sequence thereof having about 1 or 2 nucleoside substitutions, additions, or deletions.

[0079] In some embodiments, the sense strand comprises mUsmGsmGmUfGmUfCfGfAmGmAmGmAmUmCmAmCmUmAsmUsmU (SEQ ID NO: 5558), or a nucleic acid sequence thereof having about 1 or 2 nucleoside substitutions, additions, or deletions. In some embodiments, the sense strand comprises mUsmCsmGmAfGmAfGfAfUmCmAmCmUmGmAmAmAmUmAsmUsmU (SEQ ID NO: 5560), or a nucleic acid sequence thereof having about 1 or 2 nucleoside substitutions, additions, or deletions. In some embodiments, the sense strand comprises mCsmAsmGmGfUmUfUfGfCmCmAmCmUmUmUmGmUmCmAsmUsmU (SEQ ID NO: 5562), or a nucleic acid sequence thereof having about 1 or 2 nucleoside substitutions, additions, or deletions. In some embodiments, the sense strand comprises mGsmCsmAmCfCmUfUfUfUmCmAmUmGmGmUmCmUmCmAsmUsmU (SEQ ID NO: 5564), or a nucleic acid sequence thereof having about 1 or 2 nucleoside substitutions, additions, or deletions. In some embodiments, the sense strand comprises mAsmGsmCmUfGmGfAfGfCmCmUmUmCmCmUmAmAmCmAsmUsmU (SEQ ID NO: 5566), or a nucleic acid sequence thereof having about 1 or 2 nucleoside substitutions, additions, or deletions.

[0080] In some embodiments, the sense strand comprises fUsmGsfGmUfGmUfCfGfAmGfAmGfAmUfCmAfCmUfAsmUsmU (SEQ ID NO: 5456), or a nucleic acid sequence thereof having about 1 or 2 nucleoside substitutions, additions, or deletions. In some embodiments, the sense strand comprises fUsmCsfGmAfGmAfGfAfUmCfAmCfUmGfAmAfAmUfAsmUsmU (SEQ ID NO: 5460), or a nucleic acid sequence thereof having about 1 or 2 nucleoside substitutions, additions, or deletions. In some embodiments, the sense strand comprises fCsmAsfGmGfUmUfUfGfCmCfAmCfUmUfUmGfUmCfAsmUsmU (SEQ ID NO: 5476), or a nucleic acid sequence thereof having about 1 or 2 nucleoside substitutions, additions, or deletions. In some embodiments, the sense strand comprises fGsmCsfAmCfCmUfUfUfUmCfAmUfGmGfUmCfUmCfAsmUsmU (SEQ ID NO: 5510), or a nucleic acid sequence thereof having about 1 or 2 nucleoside substitutions, additions, or deletions. In some embodiments, the sense strand comprises fAsmGsfCmUfGmGfAfGfCmCfUmUfCmCfUmAfAmCfAsmUsmU (SEQ ID NO: 5524), or a nucleic acid sequence thereof having about 1 or 2 nucleoside substitutions, additions, or deletions.

[0081] In some embodiments, the sense strand comprises mUsmGsmGmUfGmUfCmGfAmGmAmGmAmUmCmAmCmUmAsmUsmU (SEQ ID NO: 6050). In some embodiments, the sense strand comprises mUsmCsmGmAfGmAfGmAfUmCmAmCmUmGmAmAmAmUmAsmUsmU (SEQ ID NO: 6051), or a nucleic acid sequence thereof having about 1 or 2 nucleoside substitutions, additions, or deletions. In some embodiments, the sense strand comprises mCsmAsmGmGfUmUfUmGfCmCmAmCmUmUmUmGmUmCmAsmUsmU (SEQ ID NO: 6052), or a nucleic acid sequence thereof having about 1 or 2 nucleoside substitutions, additions, or deletions. In some embodiments, the sense strand comprises mGsmCsmAmCfCmUfUmUfUmCmAmUmGmGmUmCmUmCmAsmUsmU (SEQ ID NO: 6053), or a nucleic acid sequence thereof having about 1 or 2 nucleoside substitutions, additions, or deletions. In some embodiments, the sense strand comprises mAsmGsmCmUfGmGfAmGfCmCmUmUmCmCmUmAmAmCmAsmUsmU (SEQ ID NO: 6054), or a nucleic acid sequence thereof having about 1 or 2 nucleoside substitutions, additions, or deletions.

[0082] In some embodiments, the sense strand comprises fUsmGsfGmUfGmUfCfGfAmGfAmGfAmUfCmAfCmUfAsmUsmUNNN-lipid (wherein each N is independently a nucleobase such as A, U, C, or G) (SEQ ID NO: 6055), or a nucleic acid sequence thereof having about 1 or 2 nucleoside substitutions, additions, or deletions. In some embodiments, the sense strand comprises fUsmCsfGmAfGmAfGfAfUmCfAmCfUmGfAmAfAmUfAsmUsmUNNN-lipid (wherein each N is independently a nucleobase such as A, U, C, or G) (SEQ ID NO: 6056), or a nucleic acid sequence thereof having about 1 or 2 nucleoside substitutions, additions, or deletions. In some embodiments, the sense strand comprises fCsmAsfGmGfUmUfUfGfCmCfAmCfUmUfUmGfUmCfAsmUsmUNNN-lipid (wherein each N is independently a nucleobase such as A, U, C, or G) (SEQ ID NO: 6057), or a nucleic acid sequence thereof having about 1 or 2 nucleoside substitutions, additions, or deletions. In some embodiments, the sense strand comprises fGsmCsfAmCfCmUfUfUfUmCfAmUfGmGfUmCfUmCfAsmUsmUNNN-lipid (wherein each N is independently a nucleobase such as A, U, C, or G) (SEQ ID NO: 6058), or a nucleic acid sequence thereof having about 1 or 2 nucleoside substitutions, additions, or deletions. In some embodiments, the sense strand comprises fAsmGsfCmUfGmGfAfGfCmCfUmUfCmCfUmAfAmCfAsmUsmUNNN-lipid (wherein each N is independently a nucleobase such as A, U, C, or G) (SEQ ID NO: 6059), or a nucleic acid sequence thereof having about 1 or 2 nucleoside substitutions, additions, or deletions.

[0083] In some embodiments, the sense strand comprises mUsmGsmGmUfGmUfCfGfAmGmAmGmAmUmCmAmCmUmAsmUsmUNNN-lipid (wherein each N is independently a nucleobase such as A, U, C, or G) (SEQ ID NO: 6060), or a nucleic acid sequence thereof having about 1 or 2 nucleoside substitutions, additions, or deletions. In some embodiments, the sense strand comprises mUsmCsmGmAfGmAfGfAfUmCmAmCmUmGmAmAmAmUmAsmUsmUNNN-lipid (wherein each N is independently a nucleobase such as A, U, C, or G) (SEQ ID NO: 6061), or a nucleic acid sequence thereof having about 1 or 2 nucleoside substitutions, additions, or deletions. In some embodiments, the sense strand comprises mCsmAsmGmGfUmUfUfGfCmCmAmCmUmUmUmGmUmCmAsmUsmUNNN-lipid (wherein each N is independently a nucleobase such as A, U, C, or G) (SEQ ID NO: 6062), or a nucleic acid sequence thereof having about 1 or 2 nucleoside substitutions, additions, or deletions. In some embodiments, the sense strand comprises mGsmCsmAmCfCmUfUfUfUmCmAmUmGmGmUmCmUmCmAsmUsmUNNN-lipid (wherein each N is independently a nucleobase such as A, U, C, or G) (SEQ ID NO: 6063), or a nucleic acid sequence thereof having about 1 or 2 nucleoside substitutions, additions, or deletions. In some embodiments, the sense strand comprises mAsmGsmCmUfGmGfAfGfCmCmUmUmCmCmUmAmAmCmAsmUsmUNNN-lipid (wherein each N is independently a nucleobase such as A, U, C, or G) (SEQ ID NO: 6064), or a nucleic acid sequence thereof having about 1 or 2 nucleoside substitutions, additions, or deletions.

[0084] In some embodiments, the antisense strand comprises mUsfAsmGmUmGfAmUmCmUmCmUmCmGfAmCfAmCmCmAsmUsmU (SEQ ID NO: 5559), or a nucleic acid sequence thereof having about 1 or 2 nucleoside substitutions, additions, or deletions. In some embodiments, the antisense strand comprises mUsfAsmUmUmUfCmAmGmUmGmAmUmCfUmCfUmCmGmAsmUsmU (SEQ ID NO: 5561), or a nucleic acid sequence thereof having about 1 or 2 nucleoside substitutions, additions, or deletions. In some embodiments, the antisense strand comprises mUsfGsmAmCmAfAmAmGmUmGmGmCmAfAmAfCmCmUmGsmUsmU (SEQ ID NO: 5563), or a nucleic acid sequence thereof having about 1 or 2 nucleoside substitutions, additions, or deletions. In some embodiments, the antisense strand comprises mUsfGsmAmGmAfCmCmAmUmGmAmAmAfAmGfGmUmGmCsmUsmU (SEQ ID NO: 5565), or a nucleic acid sequence thereof having about 1 or 2 nucleoside substitutions, additions, or deletions. In some embodiments, the antisense strand comprises mUsfGsmUmUmAfGmGmAmAmGmGmCmUfCmCfAmGmCmUsmUsmU (SEQ ID NO: 5567), or a nucleic acid sequence thereof having about 1 or 2 nucleoside substitutions, additions, or deletions.

[0085] In some embodiments, the antisense strand comprises mUsfAsmGfUmGfAmUfCmUfCmUmCmGfAmCfAmCfCmAsmUsmU (SEQ ID NO: 5457), or a nucleic acid sequence thereof having about 1 or 2 nucleoside substitutions, additions, or deletions. In some embodiments, the antisense strand comprises mUsfAsmUfUmUfCmAfGmUfGmAmUmCfUmCfUmCfGmAsmUsmU (SEQ ID NO: 5461), or a nucleic acid sequence thereof having about 1 or 2 nucleoside substitutions, additions, or deletions. In some embodiments, the antisense strand comprises mUsfGsmAfCmAfAmAfGmUfGmGmCmAfAmAfCmCfUmGsmUsmU (SEQ ID NO: 5477), or a nucleic acid sequence thereof having about 1 or 2 nucleoside substitutions, additions, or deletions. In some embodiments, the antisense strand comprises mUsfGsmAfGmAfCmCfAmUfGmAmAmAfAmGfGmUfGmCsmUsmU (SEQ ID NO: 5511), or a nucleic acid sequence thereof having about 1 or 2 nucleoside substitutions, additions, or deletions. In some embodiments, the antisense strand comprises mUsfGsmUfUmAfGmGfAmAfGmGmCmUfCmCfAmGfCmUsmUsmU (SEQ ID NO: 5525), or a nucleic acid sequence thereof having about 1 or 2 nucleoside substitutions, additions, or deletions.

[0086] In some embodiments, the antisense strand comprises mUsfAsmGmUmGfAmUfCfUmCmUmCmGfAmCfAmCmCmAsmUsmU (SEQ ID NO: 6065), or a nucleic acid sequence thereof having about 1 or 2 nucleoside substitutions, additions, or deletions. In some embodiments, the antisense strand comprises mUsfAsmUmUmUfCmAfGfUmGmAmUmCfUmCfUmCmGmAsmUsmU (SEQ ID NO: 6066), or a nucleic acid sequence thereof having about 1 or 2 nucleoside substitutions, additions, or deletions. In some embodiments, the antisense strand comprises mUsfGsmAmCmAfAmAfGfUmGmGmCmAfAmAfCmCmUmGsmUsmU (SEQ ID NO: 6067), or a nucleic acid sequence thereof having about 1 or 2 nucleoside substitutions, additions, or deletions. In some embodiments, the antisense strand comprises mUsfGsmAmGmAfCmCfAfUmGmAmAmAfAmGfGmUmGmCsmUsmU (SEQ ID NO: 6068), or a nucleic acid sequence thereof having about 1 or 2 nucleoside substitutions, additions, or deletions. In some embodiments, the antisense strand comprises mUsfGsmUmUmAfGmGfAfAmGmGmCmUfCmCfAmGmCmUsmUsmU (SEQ ID NO: 6069), or a nucleic acid sequence thereof having about 1 or 2 nucleoside substitutions, additions, or deletions.

[0087] In some embodiments, the antisense strand comprises mUsfAsmGfUmGfAmUmCmUmCmUmCmGfAmCfAmCmCmAsmUsmU (SEQ ID NO: 6070), or a nucleic acid sequence thereof having about 1 or 2 nucleoside substitutions, additions, or deletions. In some embodiments, the antisense strand comprises mUsfAsmUfUmUfCmAmGmUmGmAmUmCfUmCfUmCmGmAsmUsmU (SEQ ID NO: 6071), or a nucleic acid sequence thereof having about 1 or 2 nucleoside substitutions, additions, or deletions. In some embodiments, the antisense strand comprises mUsfGsmAfCmAfAmAmGmUmGmGmCmAfAmAfCmCmUmGsmUsmU (SEQ ID NO: 6072), or a nucleic acid sequence thereof having about 1 or 2 nucleoside substitutions, additions, or deletions. In some embodiments, the antisense strand comprises mUsfGsmAfGmAfCmCmAmUmGmAmAmAfAmGfGmUmGmCsmUsmU (SEQ ID NO: 6073), or a nucleic acid sequence thereof having about 1 or 2 nucleoside substitutions, additions, or deletions. In some embodiments, the antisense strand comprises mUsfGsmUfUmAfGmGmAmAmGmGmCmUfCmCfAmGmCmUsmUsmU (SEQ ID NO: 6074), or a nucleic acid sequence thereof having about 1 or 2 nucleoside substitutions, additions, or deletions.

[0088] A dsRNA may comprise any sense strand described herein in combination with any antisense strand described herein. In some embodiments, the sense strand comprises a nucleic acid comprising pattern 1S and the antisense strand comprises the reverse complement of at least about 10, 11, 12, 13, 14, 15, 16, 17, 18, 19, 20, or 21 nucleosides of the sense strand (e.g., about 18 nucleosides), and the pattern 1AS. In some embodiments, the sense strand comprises a nucleic acid comprising pattern 1S and the antisense strand comprises the reverse complement of at least about 10, 11, 12, 13, 14, 15, 16, 17, 18, 19, 20, or 21 nucleosides of the sense strand (e.g., about 18 nucleosides), and the pattern 2AS. In some embodiments, the sense strand comprises a nucleic acid comprising pattern 1S and the antisense strand comprises the reverse complement of at least about 10, 11, 12, 13, 14, 15, 16, 17, 18, 19, 20, or 21 nucleosides of the sense strand (e.g., about 18 nucleosides), and the pattern 3AS. In some embodiments, the sense strand comprises a nucleic acid comprising pattern 1S and the antisense strand comprises the reverse complement of at least about 10, 11, 12, 13, 14, 15, 16, 17, 18, 19, 20, or 21 nucleosides of the sense strand (e.g., about 18 nucleosides), and the pattern 4AS. In some embodiments, the sense strand comprises a sequence from SEQ ID NOS: 1-5349, 5366-5971, 6000-6038, 6050-6074.

[0089] A dsRNA may comprise any sense strand described herein in combination with any antisense strand described herein. In some embodiments, the sense strand comprises a nucleic acid comprising pattern 2S and the antisense strand comprises the reverse complement of at least about 10, 11, 12, 13, 14, 15, 16, 17, 18, 19, 20, or 21 nucleosides of the sense strand (e.g., about 18 nucleosides), and the pattern 1AS. In some embodiments, the sense strand comprises a nucleic acid comprising pattern 2S and the antisense strand comprises the reverse complement of at least about 10, 11, 12, 13, 14, 15, 16, 17, 18, 19, 20, or 21 nucleosides of the sense strand (e.g., about 18 nucleosides), and the pattern 2AS. In some embodiments, the sense strand comprises a nucleic acid comprising pattern 2S and the antisense strand comprises the reverse complement of at least about 10, 11, 12, 13, 14, 15, 16, 17, 18, 19, 20, or 21 nucleosides of the sense strand (e.g., about 18 nucleosides), and the pattern 3AS. In some embodiments, the sense strand comprises a nucleic acid comprising pattern 2S and the antisense strand comprises the reverse complement of at least about 10, 11, 12, 13, 14, 15, 16, 17, 18, 19, 20, or 21 nucleosides of the sense strand (e.g., about 18 nucleosides), and the pattern 4AS. In some embodiments, the sense strand comprises a sequence from SEQ ID NOS: 1-5349, 5366-5971, 6000-6038, 6050-6074.

[0090] A dsRNA may comprise any sense strand described herein in combination with any antisense strand described herein. In some embodiments, the sense strand comprises a nucleic acid comprising pattern 3S and the antisense strand comprises the reverse complement of at least about 10, 11, 12, 13, 14, 15, 16, 17, 18, 19, 20, or 21 nucleosides of the sense strand (e.g., about 18 nucleosides), and the pattern 1AS. In some embodiments, the sense strand comprises a nucleic acid comprising pattern 3S and the antisense strand comprises the reverse complement of at least about 10, 11, 12, 13, 14, 15, 16, 17, 18, 19, 20, or 21 nucleosides of the sense strand (e.g., about 18 nucleosides), and the pattern 2AS. In some embodiments, the sense strand comprises a nucleic acid comprising pattern 3S and the antisense strand comprises the reverse complement of at least about 10, 11, 12, 13, 14, 15, 16, 17, 18, 19, 20, or 21 nucleosides of the sense strand (e.g., about 18 nucleosides), and the pattern 3AS. In some embodiments, the sense strand comprises a nucleic acid comprising pattern 3S and the antisense strand comprises the reverse complement of at least about 10, 11, 12, 13, 14, 15, 16, 17, 18, 19, 20, or 21 nucleosides of the sense strand (e.g., about 18 nucleosides), and the pattern 4AS. In some embodiments, the sense strand comprises a sequence from SEQ ID NOS: 1-5349, 5366-5971, 6000-6038, 6050-6074.

[0091] A dsRNA may comprise any sense strand described herein in combination with any antisense strand described herein. In some embodiments, the sense strand comprises a nucleic acid comprising pattern 4S and the antisense strand comprises the reverse complement of at least about 10, 11, 12, 13, 14, 15, 16, 17, 18, 19, 20, or 21 nucleosides of the sense strand (e.g., about 18 nucleosides), and the pattern 1AS. In some embodiments, the sense strand comprises a nucleic acid comprising pattern 4S and the antisense strand comprises the reverse complement of at least about 10, 11, 12, 13, 14, 15, 16, 17, 18, 19, 20, or 21 nucleosides of the sense strand (e.g., about 18 nucleosides), and the pattern 2AS. In some embodiments, the sense strand comprises a nucleic acid comprising pattern 4S and the antisense strand comprises the reverse complement of at least about 10, 11, 12, 13, 14, 15, 16, 17, 18, 19, 20, or 21 nucleosides of the sense strand (e.g., about 18 nucleosides), and the pattern 3AS. In some embodiments, the sense strand comprises a nucleic acid comprising pattern 4S and the antisense strand comprises the reverse complement of at least about 10, 11, 12, 13, 14, 15, 16, 17, 18, 19, 20, or 21 nucleosides of the sense strand (e.g., about 18 nucleosides), and the pattern 4AS. In some embodiments, the sense strand comprises a sequence from SEQ ID NOS: 1-5349, 5366-5971, 6000-6038, 6050-6074.

[0092] A dsRNA may comprise any sense strand described herein in combination with any antisense strand described herein. In some embodiments, the sense strand comprises a nucleic acid comprising pattern 5S and the antisense strand comprises the reverse complement of at least about 10, 11, 12, 13, 14, 15, 16, 17, 18, 19, 20, or 21 nucleosides of the sense strand (e.g., about 18 nucleosides), and the pattern 1AS. In some embodiments, the sense strand comprises a nucleic acid comprising pattern 5S and the antisense strand comprises the reverse complement of at least about 10, 11, 12, 13, 14, 15, 16, 17, 18, 19, 20, or 21 nucleosides of the sense strand (e.g., about 18 nucleosides), and the pattern 2AS. In some embodiments, the sense strand comprises a nucleic acid comprising pattern 5S and the antisense strand comprises the reverse complement of at least about 10, 11, 12, 13, 14, 15, 16, 17, 18, 19, 20, or 21 nucleosides of the sense strand (e.g., about 18 nucleosides), and the pattern 3AS. In some embodiments, the sense strand comprises a nucleic acid comprising pattern 5S and the antisense strand comprises the reverse complement of at least about 10, 11, 12, 13, 14, 15, 16, 17, 18, 19, 20, or 21 nucleosides of the sense strand (e.g., about 18 nucleosides), and the pattern 4AS. In some embodiments, the sense strand comprises a sequence from SEQ ID NOS: 1-5349, 5366-5971, 6000-6038, 6050-6074.

[0093] In some aspects, provided herein is a dsRNA, wherein the sense strand comprises UGGUGUCGAGAGAUCACUG (SEQ ID NO: 5664) or a nucleic acid sequence thereof having about 1 or 2 nucleoside substitutions, additions, or deletions; and the antisense strand comprises CAGUGAUCUCUCGACACCA (SEQ ID NO: 5765) or a nucleic acid sequence thereof having about 1 or 2 nucleoside substitutions, additions, or deletions. In some aspects, provided herein is a dsRNA, wherein the sense strand comprises UGGUGUCGAGAGAUCACUA (SEQ ID NO: 5866) or a nucleic acid sequence thereof having about 1 or 2 nucleoside substitutions, additions, or deletions; and the antisense strand comprises UAGUGAUCUCUCGACACCA (SEQ ID NO: 5967) or a nucleic acid sequence thereof having about 1 or 2 nucleoside substitutions, additions, or deletions. In some aspects, provided herein is a dsRNA, wherein the sense strand comprises mUsmGsmGmUfGmUfCfGfAmGmAmGmAmUmCmAmCmUmAsmUsmU (SEQ ID NO: 5558) or a nucleic acid sequence thereof having about 1 or 2 nucleoside substitutions, additions, or deletions; and the antisense strand comprises mUsfAsmGmUmGfAmUmCmUmCmUmCmGfAmCfAmCmCmAsmUsmU (SEQ ID NO: 5559) or a nucleic acid sequence thereof having about 1 or 2 nucleoside substitutions, additions, or deletions. In some aspects, provided herein is a dsRNA, wherein the sense strand comprises UCGAGAGAUCACUGAAAUC (SEQ ID NO: 5665) or a nucleic acid sequence thereof having about 1 or 2 nucleoside substitutions, additions, or deletions; and the antisense strand comprises GAUUUCAGUGAUCUCUCGA (SEQ ID NO: 5766) or a nucleic acid sequence thereof having about 1 or 2 nucleoside substitutions, additions, or deletions. In some aspects, provided herein is a dsRNA, wherein the sense strand comprises UCGAGAGAUCACUGAAAUA (SEQ ID NO: 5867) or a nucleic acid sequence thereof having about 1 or 2 nucleoside substitutions, additions, or deletions; and the antisense strand comprises UAUUUCAGUGAUCUCUCGA (SEQ ID NO: 5968) or a nucleic acid sequence thereof having about 1 or 2 nucleoside substitutions, additions, or deletions. In some aspects, provided herein is a dsRNA, wherein the sense strand comprises mUsmCsmGmAfGmAfGfAfUmCmAmCmUmGmAmAmAmUmAsmUsmU (SEQ ID NO: 5560) or a nucleic acid sequence thereof having about 1 or 2 nucleoside substitutions, additions, or deletions; and the antisense strand comprises mUsfAsmUmUmUfCmAmGmUmGmAmUmCfUmCfUmCmGmAsmUsmU (SEQ ID NO: 5561) or a nucleic acid sequence thereof having about 1 or 2 nucleoside substitutions, additions, or deletions. In some aspects, provided herein is a dsRNA, wherein the sense strand comprises CAGGUUUGCCACUUUGUCA (SEQ ID NO: 5868) or a nucleic acid sequence thereof having about 1 or 2 nucleoside substitutions, additions, or deletions; and the antisense strand comprises UGACAAAGUGGCAAACCUG (SEQ ID NO: 5969) or a nucleic acid sequence thereof having about 1 or 2 nucleoside substitutions, additions, or deletions. In some aspects, provided herein is a dsRNA, wherein the sense strand comprises CAGGUUUGCCACUUUGUCA (SEQ ID NO: 5868) or a nucleic acid sequence thereof having about 1 or 2 nucleoside substitutions, additions, or deletions; and the antisense strand comprises UGACAAAGUGGCAAACCUG (SEQ ID NO: 5969) or a nucleic acid sequence thereof having about 1 or 2 nucleoside substitutions, additions, or deletions. In some aspects, provided herein is a dsRNA, wherein the sense strand comprises mCsmAsmGmGfUmUfUfGfCmCmAmCmUmUmUmGmUmCmAsmUsmU (SEQ ID NO: 5562) or a nucleic acid sequence thereof having about 1 or 2 nucleoside substitutions, additions, or deletions; and the antisense strand comprises mUsfGsmAmCmAfAmAmGmUmGmGmCmAfAmAfCmCmUmGsmUsmU (SEQ ID NO: 5563) or a nucleic acid sequence thereof having about 1 or 2 nucleoside substitutions, additions, or deletions. In some aspects, provided herein is a dsRNA, wherein the sense strand comprises GCACCUUUUCAUGGUCUCU (SEQ ID NO: 5667) or a nucleic acid sequence thereof having about 1 or 2 nucleoside substitutions, additions, or deletions; and the antisense strand comprises AGAGACCAUGAAAAGGUGC (SEQ ID NO: 5768) or a nucleic acid sequence thereof having about 1 or 2 nucleoside substitutions, additions, or deletions. In some aspects, provided herein is a dsRNA, wherein the sense strand comprises GCACCUUUUCAUGGUCUCA (SEQ ID NO: 5869) or a nucleic acid sequence thereof having about 1 or 2 nucleoside substitutions, additions, or deletions; and the antisense strand comprises UGAGACCAUGAAAAGGUGC (SEQ ID NO: 5970) or a nucleic acid sequence thereof having about 1 or 2 nucleoside substitutions, additions, or deletions. In some aspects, provided herein is a dsRNA, wherein the sense strand comprises mGsmCsmAmCfCmUfUfUfUmCmAmUmGmGmUmCmUmCmAsmUsmU (SEQ ID NO: 5564) or a nucleic acid sequence thereof having about 1 or 2 nucleoside substitutions, additions, or deletions; and the antisense strand comprises mUsfGsmAmGmAfCmCmAmUmGmAmAmAfAmGfGmUmGmCsmUsmU (SEQ ID NO: 5565) or a nucleic acid sequence thereof having about 1 or 2 nucleoside substitutions, additions, or deletions. In some aspects, provided herein is a dsRNA, wherein the sense strand comprises AGCUGGAGCCUUCCUAACC (SEQ ID NO: 5668) or a nucleic acid sequence thereof having about 1 or 2 nucleoside substitutions, additions, or deletions; and the antisense strand comprises GGUUAGGAAGGCUCCAGCU (SEQ ID NO: 5769) or a nucleic acid sequence thereof having about 1 or 2 nucleoside substitutions, additions, or deletions. In some aspects, provided herein is a dsRNA, wherein the sense strand comprises AGCUGGAGCCUUCCUAACA (SEQ ID NO: 5870) or a nucleic acid sequence thereof having about 1 or 2 nucleoside substitutions, additions, or deletions; and the antisense strand comprises UGUUAGGAAGGCUCCAGCU (SEQ ID NO: 5971) or a nucleic acid sequence thereof having about 1 or 2 nucleoside substitutions, additions, or deletions. In some aspects, provided herein is a dsRNA, wherein the sense strand comprises mAsmGsmCmUfGmGfAfGfCmCmUmUmCmCmUmAmAmCmAsmUsmU (SEQ ID NO: 5566) or a nucleic acid sequence thereof having about 1 or 2 nucleoside substitutions, additions, or deletions; and the antisense strand comprises mUsfGsmUmUmAfGmGmAmAmGmGmCmUfCmCfAmGmCmUsmUsmU (SEQ ID NO: 5567) or a nucleic acid sequence thereof having about 1 or 2 nucleoside substitutions, additions, or deletions.

[0094] In some aspects, provided herein is a dsRNA comprising a sense strand comprising one or more sequences selected from SEQ ID NOS: 1-5349, 5366-5971, 6000-6038, and 6050-6074; or a nucleic acid sequence thereof having about 1 or 2 nucleoside substitutions, additions, or deletions. In some cases, the dsRNA further comprises an antisense strand comprising the reverse complement of the sense strand. In some aspects, provided herein is a dsRNA comprising a sense strand comprising the first 19 nucleobases of one or more sequences selected from SEQ ID NOS: 1-5349, 5366-5971, 6000-6038, and 6050-6074; or a nucleic acid sequence thereof having about 1 or 2 nucleoside substitutions, additions, or deletions. In some cases, the dsRNA further comprises an antisense strand comprising the reverse complement of the sense strand.

[0095] In some embodiments, a dsRNA is provided that inhibits the expression of ALOX15, wherein the siRNA comprises a sense strand and an antisense strand, each strand is independently 14-30 nucleosides in length, and at least one of the sense strand and the antisense strand comprises a nucleoside sequence comprising at least 14 contiguous nucleosides of SEQ ID NO: 6000 (C AGAGCTGCAG ACCTGGTGTC GAGAGATCAC TGAAATCGGG CTGCAAGGGG CCCAGGACCG AGGGTTTCCT GTCTCTTTAC AGGCTCGGGA CCAGGTTTGC CACTTTGTCA CCATGTGTAT CTTCACCTGC ACCGGCCAAC ACGCCTCTGT). In some cases, the sense strand comprises at least 14 contiguous nucleosides of SEQ ID NO: 6001 (C AGAGCTGCAG ACCTGGTGTC GAGAGATCAC TGAAATCGGG CTGCAAGGGG). In some cases, the sense strand comprises at least 14 contiguous nucleosides of SEQ ID NO: 6002 (CTTTAC AGGCTCGGGA CCAGGTTTGC CACTTTGTCA CCATGTGTAT CTTCA).

[0096] In some embodiments, a dsRNA is provided that inhibits the expression of ALOX15, wherein the siRNA comprises a sense strand and an antisense strand, each strand is independently 14-30 nucleosides in length, and at least one of the sense strand and the antisense strand comprises a nucleoside sequence comprising at least 14 contiguous nucleosides of SEQ ID NO: 6003 (A CCCTCTTCCC ATGTCCCACC CTCCCTAGAG GGGCACCTTT TCATGGTCTC TGCACCCAGT GAACACATTT TACTCTAGAG GCATCACCTG GGACCTTACT). In some embodiments, the sense strand and/or antisense strand comprises at least 14 contiguous nucleosides of SEQ ID NO: 6004 (TAGAG GGGCACCTTT TCATGGTCTC TGCACCCAGT GAACACATTT TACTC).

[0097] In some embodiments, a dsRNA is provided that inhibits the expression of ALOX15, wherein the siRNA comprises a sense strand and an antisense strand, each strand is independently 14-30 nucleosides in length, and at least one of the sense strand and the antisense strand comprises a nucleoside sequence comprising at least 14 contiguous nucleosides of SEQ ID NO: 6005 (G ACATGGGAAT TTTCGACCAG ATAATGAGCA CTGGTGGGGG AGGCCACGTG CAGCTGCTCA AGCAAGCTGG AGCCTTCCTA ACCTACAGCT CCTTCTGTCC CCCTGATGAC TTGGCCGACC GGGGGCTCCT GGGAGTGAAG TCTTCCTTCT). In some cases, the sense strand and/or antisense strand comprises at least 14 contiguous nucleosides of SEQ ID NO: 6006 (G CAGCTGCTCA AGCAAGCTGG AGCCTTCCTA ACCTACAGCT CCTTCTGTCC).

### Modifications

[0098] Described herein, in some embodiments, are dsRNA comprising a modification. Any of the sense strands and/or antisense strands described elsewhere herein may comprise a modification. Non-limiting examples of sense strand modifications include patterns 1S, 2S, 3S, 4S, and 5S. Pattern 1S comprises 5′ fN s mN s fN-mN-fN-mN-fN-fN-fN-mN-fN-mN-fN-mN-fN-mN-fN-mN-fN s mN s mN 3′. Pattern 2S comprises 5′ mN s mN s mN-mN-fN-mN-fN-fN-fN-mN-mN-mN-mN-mN-mN-mN-mN-mN-mN s mN s mN 3′. Pattern 3S comprises 5′ mN s mN s mN-mN-fN-mN-fN-mN-fN-mN-mN-mN-mN-mN-mN-mN-mN-mN-mN s mN s mN 3′. Pattern 4S comprises 5′ fN s mN s fN-mN-fN-mN-fN-fN-fN-mN-fN-mN-fN-mN-fN-mN-fN-mN-fN s mN s mN-N-N-N-Lipid 3′. Pattern 5S comprises 5′ mN s mN s mN-mN-fN-mN-fN-fN-fN-mN-mN-mN-mN-mN-mN-mN-mN-mN-mN s mN s mN-N-N-N-Lipid 3′. The “N” can be any nucleoside (for example ribose, deoxyribose, or derivatives thereof), “fN” is a 2′ fluoro-modified nucleoside, “m” is a 2′ O-methyl modified nucleoside, “-” is a phosphodiester and “s” is a phosphorothioate, and the lipid can comprise any molecule containing more than 14 sp3 hybridized carbons, e.g., cholesterol, myristoyl, palmitoyl, stearoyl, lithocholoyl, docosanoyl, docosahexaenoyl, myristyl, palmityl stearyl, α-tocopherol, or a combination thereof. In some embodiments, the N at position 1, 2, 3, 4, 5, 6, 7, 8, 9, 10, 11, 12, 13, 14, 15, 16, 17, 18, 19, 20, or 21, or a combination thereof, is a ribose.

[0099] In some embodiments, the sense strand comprises the pattern mNfNmNfN, where each mN may be connected to each fN by a phosphodiester or phosphorothioate bond. In some cases, the mNfNmNfN is at positions 4-7 of the sense strand. In some cases, the sense strand comprises fNfNfN, where each fN may be connected by a phosphodiester or phosphorothioate bond. In some cases, the sense strand comprises fNfNfNfNfNfNfNfNfNfNfNfN, where each fN may be connected by a phosphodiester or phosphorothioate bond.

[0100] Non-limiting examples of antisense strand modifications include patterns 1AS, 2AS, 3AS, and 4AS. Pattern 1AS comprises 5′ mN s fN s mN-fN-mN-fN-mN-fN-mN-fN-mN-mN-mN-fN-mN-fN-mN-fN-mN s mN s mN 3′. Pattern 2AS comprises 5′ mN s fN s mN-mN-mN-fN-mN-fN-fN-mN-mN-mN-mN-fN-mN-fN-mN-mN-mN s mN s mN 3′. Pattern 3AS comprises 5′ mN s fN s mN-mN-mN-fN-mN-mN-mN-mN-mN-mN-mN-fN-mN-fN-mN-mN-mN s mN s mN 3′. Pattern 4AS comprises 5′ mN s fN s mN-fN-mN-fN-mN-mN-mN-mN-mN-mN-mN-fN-mN-fN-mN-mN-mN s mN s mN 3′.

[0101] In some embodiments, the antisense strand comprises at least two patterns of mNmNmN, where each mN may be connected by a phosphodiester or phosphorothioate bond. For instance, the antisense strand may comprise 2 mNmNmN patterns. In some cases, the antisense strand comprises a mNmNmNmN pattern and a mNmNmNmNmN pattern. In some cases, the antisense strand comprises a mNmNmNmNmNmNmN pattern and a mNmNmNmNmN pattern. In some embodiments, the antisense strand comprises mNfNmNfN. In some cases, the mNfNmNfN is at positions 13-16 of the antisense strand, in a 5′ to 3′ direction.

[0102] In some embodiments, a dsRNA comprises a sense strand comprising pattern 1S and an antisense strand comprising pattern 1AS. In some embodiments, a dsRNA comprises a sense strand comprising pattern 2S and an antisense strand comprising pattern 2AS. In some embodiments, a dsRNA comprises a sense strand comprising pattern 3S and an antisense strand comprising pattern 3AS. In some embodiments, a dsRNA comprises a sense strand comprising pattern 4S and an antisense strand comprising pattern 4AS.

[0103] In some embodiments, a dsRNA comprising Formula IA comprises pattern 1S. In some embodiments, a dsRNA comprising Formula IIA comprises pattern 1S. In some embodiments, a dsRNA comprising Formula IIIA comprises pattern 1S. In some embodiments, a dsRNA comprising Formula IVA comprises pattern 1S. In some embodiments, a dsRNA comprising Formula VA comprises pattern 1S. In some embodiments, a dsRNA comprising Formula VIA comprises pattern 1S. In some embodiments, a dsRNA comprising Formula VIIA comprises pattern 1S. In some embodiments, a dsRNA comprising Formula VIIIA comprises pattern 1S.

[0104] In some embodiments, a dsRNA comprising Formula IA comprises pattern 2S. In some embodiments, a dsRNA comprising Formula IIA comprises pattern 2S. In some embodiments, a dsRNA comprising Formula IIIA comprises pattern 2S. In some embodiments, a dsRNA comprising Formula IVA comprises pattern 2S. In some embodiments, a dsRNA comprising Formula VA comprises pattern 2S. In some embodiments, a dsRNA comprising Formula VIA comprises pattern 2S. In some embodiments, a dsRNA comprising Formula VIIA comprises pattern 2S. In some embodiments, a dsRNA comprising Formula VIIIA comprises pattern 2S.

[0105] In some embodiments, a dsRNA comprising Formula IA comprises pattern 3S. In some embodiments, a dsRNA comprising Formula IIA comprises pattern 3S. In some embodiments, a dsRNA comprising Formula IIIA comprises pattern 3S. In some embodiments, a dsRNA comprising Formula IVA comprises pattern 3S. In some embodiments, a dsRNA comprising Formula VA comprises pattern 3S. In some embodiments, a dsRNA comprising Formula VIA comprises pattern 3S. In some embodiments, a dsRNA comprising Formula VIIA comprises pattern 3S. In some embodiments, a dsRNA comprising Formula VIIIA comprises pattern 3S.

[0106] In some embodiments, a dsRNA comprising Formula IA comprises pattern 4S. In some embodiments, a dsRNA comprising Formula IIA comprises pattern 4S. In some embodiments, a dsRNA comprising Formula IIIA comprises pattern 4S. In some embodiments, a dsRNA comprising Formula IVA comprises pattern 4S. In some embodiments, a dsRNA comprising Formula VA comprises pattern 4S. In some embodiments, a dsRNA comprising Formula VIA comprises pattern 4S. In some embodiments, a dsRNA comprising Formula VIIA comprises pattern 4S. In some embodiments, a dsRNA comprising Formula VIIIA comprises pattern 4S.

[0107] In some embodiments, a dsRNA comprising Formula IA comprises pattern 5S. In some embodiments, a dsRNA comprising Formula IIA comprises pattern 5S. In some embodiments, a dsRNA comprising Formula IIIA comprises pattern 5S. In some embodiments, a dsRNA comprising Formula IVA comprises pattern 5S. In some embodiments, a dsRNA comprising Formula VA comprises pattern 5S. In some embodiments, a dsRNA comprising Formula VIA comprises pattern 5S. In some embodiments, a dsRNA comprising Formula VIIA comprises pattern 5S. In some embodiments, a dsRNA comprising Formula VIIIA comprises pattern 5S.

[0108] In some embodiments, a dsRNA comprising Formula IB comprises pattern 1AS. In some embodiments, a dsRNA comprising Formula IIB comprises pattern 1AS. In some embodiments, a dsRNA comprising Formula IIIB comprises pattern 1AS. In some embodiments, a dsRNA comprising Formula IVB comprises pattern 1AS. In some embodiments, a dsRNA comprising Formula VB comprises pattern 1AS. In some embodiments, a dsRNA comprising Formula VIB comprises pattern 1AS. In some embodiments, a dsRNA comprising Formula VIIB comprises pattern 1AS. In some embodiments, a dsRNA comprising Formula VIIIB comprises pattern 1AS.

[0109] In some embodiments, a dsRNA comprising Formula IB comprises pattern 2AS. In some embodiments, a dsRNA comprising Formula IIB comprises pattern 2AS. In some embodiments, a dsRNA comprising Formula IIIB comprises pattern 2AS. In some embodiments, a dsRNA comprising Formula IVB comprises pattern 2AS. In some embodiments, a dsRNA comprising Formula VB comprises pattern 2AS. In some embodiments, a dsRNA comprising Formula VIB comprises pattern 2AS. In some embodiments, a dsRNA comprising Formula VIIB comprises pattern 2AS. In some embodiments, a dsRNA comprising Formula VIIIB comprises pattern 2AS.

[0110] In some embodiments, a dsRNA comprising Formula IB comprises pattern 3AS. In some embodiments, a dsRNA comprising Formula IIB comprises pattern 3AS. In some embodiments, a dsRNA comprising Formula IIIB comprises pattern 3AS. In some embodiments, a dsRNA comprising Formula IVB comprises pattern 3AS. In some embodiments, a dsRNA comprising Formula VB comprises pattern 3AS. In some embodiments, a dsRNA comprising Formula VIB comprises pattern 3AS. In some embodiments, a dsRNA comprising Formula VIIB comprises pattern 3AS. In some embodiments, a dsRNA comprising Formula VIIIB comprises pattern 3AS.

[0111] In some embodiments, a dsRNA comprising Formula IB comprises pattern 4AS. In some embodiments, a dsRNA comprising Formula IIB comprises pattern 4AS. In some embodiments, a dsRNA comprising Formula IIIB comprises pattern 4AS. In some embodiments, a dsRNA comprising Formula IVB comprises pattern 4AS. In some embodiments, a dsRNA comprising Formula VB comprises pattern 4AS. In some embodiments, a dsRNA comprising Formula VIB comprises pattern 4AS. In some embodiments, a dsRNA comprising Formula VIIB comprises pattern 4AS. In some embodiments, a dsRNA comprising Formula VIIIB comprises pattern 4AS.

[0112] In some embodiments, a dsRNA comprising Formula IB comprises pattern 5AS. In some embodiments, a dsRNA comprising Formula IIB comprises pattern 5AS. In some embodiments, a dsRNA comprising Formula IIIB comprises pattern 5AS. In some embodiments, a dsRNA comprising Formula IVB comprises pattern 5AS. In some embodiments, a dsRNA comprising Formula VB comprises pattern 5AS. In some embodiments, a dsRNA comprising Formula VIB comprises pattern 5AS. In some embodiments, a dsRNA comprising Formula VIIB comprises pattern 5AS. In some embodiments, a dsRNA comprising Formula VIIIB comprises pattern 5AS.

[0113] In some embodiments, a dsRNA comprising any one of SEQ ID NOS: 1-5349, 5366-5971, 6000-6038, 6050-6074, comprises pattern 1S. In some embodiments, a dsRNA comprising any one of SEQ ID NOS: 1-5349, 5366-5971, 6000-6038, 6050-6074, comprises pattern 1AS. In some embodiments, a dsRNA comprising any one of SEQ ID NOS: 1-5349, 5366-5971, 6000-6038, 6050-6074, comprises pattern 2S. In some embodiments, a dsRNA comprising any one of SEQ ID NOS: 1-5349, 5366-5971, 6000-6038, 6050-6074, comprises pattern 2AS. In some embodiments, a dsRNA comprising any one of SEQ ID NOS: 1-5349, 5366-5971, 6000-6038, 6050-6074, comprises pattern 3s. In some embodiments, a dsRNA comprising any one of SEQ ID NOS: 1-5349, 5366-5971, 6000-6038, 6050-6074, comprises pattern 3AS. In some embodiments, a dsRNA comprising any one of SEQ ID NOS: 1-5349, 5366-5971, 6000-6038, 6050-6074, comprises pattern 4S. In some embodiments, a dsRNA comprising any one of SEQ ID NOS: 1-5349, 5366-5971, 6000-6038, 6050-6074, comprises pattern 4AS.

[0114] In some embodiments, a dsRNA comprises a sense strand comprising any one of SEQ ID NOS: 1-5349, 5366-5971, 6000-6038, 6050-6074, and pattern 1S. In some instances, the dsRNA further comprises an antisense strand comprising the reverse complement of the sense strand, and pattern 1AS, 2A, 3AS, or 4AS. For instance, the antisense strand comprises 1AS.

[0115] In some embodiments, a dsRNA comprises a sense strand comprising any one of SEQ ID NOS: 1-5349, 5366-5971, 6000-6038, 6050-6074, and pattern 2S. In some instances, the dsRNA further comprises an antisense strand comprising the reverse complement of the sense strand, and pattern 1AS, 2A, 3AS, or 4AS. For instance, the antisense strand comprises 2AS.

[0116] In some embodiments, a dsRNA comprises a sense strand comprising any one of SEQ ID NOS: 1-5349, 5366-5971, 6000-6038, 6050-6074, and pattern 3S. In some instances, the dsRNA further comprises an antisense strand comprising the reverse complement of the sense strand, and pattern 1AS, 2A, 3AS, or 4AS. For instance, the antisense strand comprises 3AS.

[0117] In some embodiments, a dsRNA comprises a sense strand comprising any one of SEQ ID NOS: 1-5349, 5366-5971, 6000-6038, 6050-6074, and pattern 4S. In some instances, the dsRNA further comprises an antisense strand comprising the reverse complement of the sense strand, and pattern 1AS, 2A, 3AS, or 4AS. For instance, the antisense strand comprises 4AS.

[0118] In some embodiments, a dsRNA comprises a sense strand comprising any one of SEQ ID NOS: 1-5349, 5366-5971, 6000-6038, 6050-6074, and pattern 5S. In some instances, the dsRNA further comprises an antisense strand comprising the reverse complement of the sense strand, and pattern 1AS, 2A, 3AS, or 4AS. For instance, the antisense strand comprises 4AS.

[0119] Internucleoside Linkage Modifications

[0120] In some embodiments, the modification comprises a phosphodiester group. In some embodiments, the modified internucleoside linkage comprises alkylphosphonate, phosphorothioate, methylphosphonate, phosphorodithioate, alkylphosphonothioate, phosphoramidate, carbamate, carbonate, phosphate triester, acetamidate, or carboxymethyl ester, or a combination thereof. In some cases, the modified internucleoside linkage comprises one or more phosphorothioate linkages, where the substitution of one non-bridging oxygen of a phosphodiester with a sulfur atom creates the phosphorothioate (PS) linkage. A PS bond creates a new stereocenter in the nucleotide and when synthesized under standard achiral conditions creates diastereomeric mixtures of Rp and Sp at the phosphorous atom. In some cases, the one or more phosphorothioate linkages is about 1, 2, 3, 4, 5, 6, 7, 8, 9, 10, 11, 12, 13, 14, 15, 16, 17, 18, 19, 20, 21, 22, 23, 24, 25, 26, 27, 28, 29, 30, 31, 32, 33, 34, 35, 36, 37, 38, 39, 40, 41, or 42 phosphorothioate linkages.

[0121] In some embodiments, the sense strand of the siRNA comprises one or more phosphorothioate linkages. In some cases, the one or more phosphorothioate linkages of the sense strand is about 1, 2, 3, 4, 5, 6, 7, 8, 9, 10, 11, 12, 13, 14, 15, 16, 17, 18, 19, 20, or 21 phosphorothioate linkages. In some cases, the one or more phosphorothioate linkages of the sense strand is about 1, 2, 3, 4, or 5 phosphorothioate linkages. In some cases, the one or more phosphorothioate linkages of the sense strand is about 4 phosphorothioate linkages. In some cases, the sense strand comprises a phosphorothioate linkage between the first nucleoside and the second nucleoside of the sense strand, in a 5′ to 3′ direction. In some cases, the sense strand comprises a phosphorothioate linkage between the second nucleoside and the third nucleoside of the sense strand, in a 5′ to 3′ direction. In some cases, the sense strand comprises a phosphorothioate linkage between the nineteenth nucleoside and the twentieth nucleoside of the sense strand, in a 5′ to 3′ direction. In some cases, the sense strand comprises a phosphorothioate linkage between the twentieth nucleoside and the twenty-first nucleoside of the sense strand, in a 5′ to 3′ direction.

[0122] In some embodiments, the antisense strand of the siRNA comprises one or more phosphorothioate linkages. In some cases, the one or more phosphorothioate linkages of the antisense strand is about 1, 2, 3, 4, 5, 6, 7, 8, 9, 10, 11, 12, 13, 14, 15, 16, 17, 18, 19, 20, or 21 phosphorothioate linkages. In some cases, the one or more phosphorothioate linkages of the antisense strand is about 1, 2, 3, 4, or 5 phosphorothioate linkages. In some cases, the one or more phosphorothioate linkages of the antisense strand is about 4 phosphorothioate linkages. In some cases, the antisense strand comprises a phosphorothioate linkage between the first nucleoside and the second nucleoside of the antisense strand, in a 5′ to 3′ direction. In some cases, the antisense strand comprises a phosphorothioate linkage between the second nucleoside and the third nucleoside of the antisense strand, in a 5′ to 3′ direction. In some cases, the antisense strand comprises a phosphorothioate linkage between the nineteenth nucleoside and the twentieth nucleoside of the sense strand, in a 5′ to 3′ direction. In some cases, the antisense strand comprises a phosphorothioate linkage between the twentieth nucleoside and the twenty-first nucleoside of the sense strand, in a 5′ to 3′ direction.

[0123] There are other functional groups that have been identified as replacements of the phosphodiester group in the oligonucleotide. Like phosphates and phosphorothioates, there are a variety of functional groups that are negatively charged such as phosphorodithioate (PS2) and thio-phosphoramidates. There are number of analogues that are uncharged such as phosphorodiamidate morpholino oligomer (PMO), peptide nucleic acid (PNA), phosphotriesters, and phosphonates. It has been postulated that the uncharged analogues are not only nuclease resistant, but may also be more membrane permeable; however, the size and hydrophilicity of uncharged oligonucleotides still preclude their passive diffusion across membranes.

[0124] Morpholino oligos (PMOs) use a hydrolytically stable, uncharged phosphorodiamidate functional group.

[0125] Peptide nucleic acids (PNAs) are—as their name suggests—based upon the amide functional group.

[0126] Enemas and intramuscular, intravitreal, intrathecal injections have been used for the administration of a variety of oligonucleotides with and without PS bonds.

[0127] Nucleoside Modifications

[0128] In some embodiments, a dsRNA comprises a modified nucleoside. In some instances, the modified nucleoside comprises a locked nucleic acid (LNA), hexitol nucleic acid (HLA), cyclohexene nucleic acid (CeNA), 2′-methoxyethyl, 2′-O-alkyl, 2′-O-allyl, 2′-O-allyl, 2′-fluoro, or 2′-deoxy, or a combination thereof. In some instances, the modified nucleoside comprises a 2′-O-methyl nucleoside, 2′-deoxyfluoro nucleoside, 2′-O—N-methylacetamido (2′-O-NMA) nucleoside, a 2′-O-dimethylaminoethoxyethyl (2′-O-DMAEOE) nucleoside, 2′-O-aminopropyl (2′-O-AP) nucleoside, or 2′-ara-F, or a combination thereof.

[0129] In some embodiments, the modification comprises nucleoside analogues that alter the structure of ribose. There are a variety of nucleotide mimics wherein the ribose or deoxyribose is modified to increase affinity for target and/or increase nuclease resistance. Modifications to all five positions of the ribose ring have been made; however, the modifications of the 2′ position of ribose have been the most studied.

[0130] 1′ Position. The base. There are a few examples of base modifications that are designed to increase base pairing. One example is the G-clamp which is a cytidine mimic that is designed to have increased affinity for guanosine bases due to hydrogen bonding through an aminoethyl group. C-5 propynyl pyrimidines are known to form more stable duplexes; however, they appear to be more toxic as well.

[0131] 2′ Modifications. In some embodiments, modifications of the hydroxyl group at the 2′ position of ribose are used to mimic the structure of the ribose ring while inhibiting ribonucleases that require the 2′OH group for hydrolysis of RNA. 2′-O-Methyl ribonucleic acids are naturally occurring nucleosides and have been shown to increase binding affinity to RNA itself while being resistant to ribonuclease. 2′-O-Methyl groups can be extensively substituted into RNAi triggers, and were the first nucleotide analogues used in “antagomirs.” 2′-O-Methoxyethyl (MOE) modification was designed to mimic the ribonuclease resistance of O-methyl, attenuate protein-oligonucleotide interactions and have increased affinity for RNA.

[0132] Fluorine is highly electronegative, and 2′-deoxy-2′-fluoro (2′-F) analogues of nucleosides adopt C3′-endo conformations characteristic of the sugars in RNA helices.

[0133] In some embodiments, the modified nucleoside comprises one or more 2′fluoro modified nucleosides. In some instances, the one or more 2′ fluoro modified nucleosides is about 1, 2, 3, 4, 5, 6, 7, 8, 9, 10, 11, 12, 13, 14, 15, 16, 17, 18, 19, 20, 21, 22, 23, 24, 25, 26, 27, 28, 29, 30, 31, 32, 33, 34, 35, 36, 37, 38, 39, 40, 41, or 42 2′ fluoro modified nucleosides.

[0134] In some instances, the sense strand of the siRNA comprises one or more 2′ fluoro modified nucleosides. In some instances, the one or more 2′ fluoro modified nucleosides of the sense strand is about 1, 2, 3, 4, 5, 6, 7, 8, 9, 10, 11, 12, 13, 14, 15, 16, 17, 18, 19, 20, or 21 2′ fluoro modified nucleosides. In some instances, the nucleoside at position 1, 2, 3, 4, 5, 6, 7, 8, 9, 10, 11, 12, 13, 14, 15, 16, 17, 18, 19, 20, or 21, or a combination thereof, of the sense strand comprises the 2′ fluoro modified nucleoside, in a 5′ to 3′ direction. In some instances, the nucleoside at position 1, 3, 5, 7, 8, 9, 11, 13, 15, 17, or 19, or a combination thereof, of the sense strand comprises the 2′ fluoro modified nucleoside, in a 5′ to 3′ direction. In some instances, the fifth, seventh, and ninth nucleosides of the sense strand comprises the 2′ fluoro modified nucleoside, in a 5′ to 3′ direction.

[0135] In certain embodiments, the sense strand comprises the pattern fN-Z1-fN-Z2-fN, wherein fN comprises the 2′ fluoro modified nucleoside and Z1 and Z2 are independently a 2′ O-methyl modified nucleoside or a 2′ fluoro modified nucleoside. In some instances, the fN-Z1-fN-Z2-fN corresponds to nucleosides five to nine of the sense strand, in a 5′ to 3′ direction. In some instances, the sense strand comprises at least two contiguous 2′ fluoro modified nucleosides. In some instances, the at least two contiguous 2′ fluoro modified nucleosides is two contiguous 2′ fluoro modified nucleosides. In some instances, the at least two contiguous 2′ fluoro modified nucleosides is three contiguous 2′ fluoro modified nucleosides.

[0136] In some embodiments, the antisense strand of the siRNA comprises one or more 2′ fluoro modified nucleosides. In some instances, the one or more 2′ fluoro modified nucleosides of the antisense strand is about 1, 2, 3, 4, 5, 6, 7, 8, 9, 10, 11, 12, 13, 14, 15, 16, 17, 18, 19, 20, or 21 2′ fluoro modified nucleosides. In some instances, the one or more 2′ fluoro modified nucleosides of the antisense strand is about 8, 6, 5, or 4 2′ fluoro modified nucleosides. In some cases, the nucleoside at position, 1, 2, 3, 4, 5, 6, 7, 8, 9, 10, 11, 12, 13, 14, 15, 16, 17, 18, 19, 20, or 21, or a combination thereof, of the antisense strand comprises the 2′ fluoro modified nucleoside, in a 5′ to 3′ direction. In some cases, the nucleoside at position, 2, 4, 6, 8, 9, 10, 14, 16, or 18, or a combination thereof, of the antisense strand comprises the 2′ fluoro modified nucleoside, in a 5′ to 3′ direction. In some cases, the second and fourteenth nucleosides of the antisense strand comprises the 2′ fluoro modified nucleoside, in a 5′ to 3′ direction. In some cases, the second, sixth, fourteenth, and sixteenth nucleosides of the antisense strand comprises the 2′ fluoro modified nucleoside, in a 5′ to 3′ direction.

[0137] In certain embodiments, the antisense strand comprises the pattern Z3-fN-Z4-fN, wherein fN comprises the 2′ fluoro modified nucleoside and Z3 and Z4 are independently a 2′ O-methyl modified nucleoside or a 2′ fluoro modified nucleoside. In some cases, the Z3-fN-Z4-fN corresponds to nucleosides thirteen to sixteen of the antisense strand, in a 5′ to 3′ direction.

[0138] In some embodiments, the modified nucleoside comprises a 2′ O-alkyl modified nucleoside. In some instances, the 2′-O-alkyl modified nucleoside comprises one or more 2′ O-methyl modified nucleosides. In some instances, the one or more 2′ O-methyl modified nucleosides is about 1, 2, 3, 4, 5, 6, 7, 8, 9, 10, 11, 12, 13, 14, 15, 16, 17, 18, 19, 20, 21, 22, 23, 24, 25, 26, 27, 28, 29, 30, 31, 32, 33, 34, 35, 36, 37, 38, 39, 40, 41, or 42 2′ O-methyl modified nucleosides.

[0139] In certain embodiments, the sense strand of the siRNA comprises one or more 2′ O-methyl modified nucleosides. In some instances, the one or more 2′ O-methyl modified nucleosides of the sense strand is about 1, 2, 3, 4, 5, 6, 7, 8, 9, 10, 11, 12, 13, 14, 15, 16, 17, 18, 19, 20, or 21 2′ O-methyl modified nucleosides. In some instances, the nucleoside at position 1, 2, 3, 4, 5, 6, 7, 8, 9, 10, 11, 12, 13, 14, 15, 16, 17, 18, 19, 20, 21, or a combination thereof, of the sense strand comprises the one or more 2′ O-methyl modified nucleosides. In some instances, the nucleoside at position 1, 2, 3, 4, 6, 8, 10, 11, 12, 13, 14, 15, 16, 17, 18, 19, 20, 21, or a combination thereof, of the sense strand comprises the one or more 2′ O-methyl modified nucleosides. In some instances, the second, fourth, sixth, tenth, twelfth, fourteenth, and sixteenth, eighteenth, twentieth, and twenty-first nucleosides of the sense strand comprises the 2′ O-methyl modified nucleoside, in a 5′ to 3′ direction.

[0140] In some embodiments, the sense strand comprises the pattern mN-Z5-mN-Z6, wherein mN comprises the 2′ O-methyl modified nucleoside and Z5 and Z6 are independently a 2′ O-methyl modified nucleoside or a 2′ fluoro modified nucleoside. In some instances, the mN-Z5-mN-Z6-mN corresponds to nucleosides four to seven of the sense strand, in a 5′ to 3′ direction. In some instances, Z5 is the 2′ fluoro modified nucleoside. In some instances, Z5 is the 2′ O-methyl modified nucleoside. In some instances, Z6 is the 2′ fluoro modified nucleoside. In some instances, Z6 is the 2′ O-methyl modified nucleoside.

[0141] In some embodiments, the sense strand comprises the pattern mN-Z5-mN-Z6-mN, wherein mN comprises the 2′ O-methyl modified nucleoside and Z5 and Z6 are independently a 2′ O-methyl modified nucleoside or a 2′ fluoro modified nucleoside. In some instances, the mN-Z5-mN-Z6-mN corresponds to nucleosides two to six of the sense strand, in a 5′ to 3′ direction. In some instances, the mN-Z5-mN-Z6-mN corresponds to nucleosides ten to fourteen of the sense strand, in a 5′ to 3′ direction. In some instances, the mN-Z5-mN-Z6-mN corresponds to nucleosides twelve to sixteen of the sense strand, in a 5′ to 3′ direction. In some instances, the mN-Z5-mN-Z6-mN corresponds to nucleosides fourteen to eighteen of the sense strand, in a 5′ to 3′ direction. In some instances, the mN-Z5-mN-Z6-mN corresponds to nucleosides sixteen to twenty of the sense strand, in a 5′ to 3′ direction.

[0142] In some embodiments, the sense strand comprises the pattern mN-Z5-mN-Z6-mN-Z7-mN, wherein Z7 is a 2′ O-methyl modified nucleoside or a 2′ fluoro modified nucleoside. In some instances, the mN-Z5-mN-Z6-mN-Z7-mN corresponds to nucleosides ten to sixteen of the sense strand, in a 5′ to 3′ direction. In some instances, the mN-Z5-mN-Z6-mN-Z7-mN corresponds to nucleosides twelve to eighteen of the sense strand, in a 5′ to 3′ direction. In some instances, the mN-Z5-mN-Z6-mN-Z7-mN corresponds to nucleosides fourteen to twenty of the sense strand, in a 5′ to 3′ direction.

[0143] In some embodiments, the sense strand comprises the pattern mN-Z5-mN-Z6-mN-Z7-mN-Z8-mN, wherein Z8 is a 2′ O-methyl modified nucleoside or a 2′ fluoro modified nucleoside. In some instances, the mN-Z5-mN-Z6-mN-Z7-mN-Z8-mN corresponds to nucleosides ten to eighteen of the sense strand, in a 5′ to 3′ direction. In some instances, the mN-Z5-mN-Z6-mN-Z7-mN-Z8-mN corresponds to nucleosides twelve to twenty of the sense strand, in a 5′ to 3′ direction. In some embodiments, the sense strand comprises the pattern mN-Z5-mN-Z6-mN-Z7-mN-Z8-mN-Z9-mN, wherein Z9 is a 2′ O-methyl modified nucleoside or a 2′ fluoro modified nucleoside. In some instances, the mN-Z5-mN-Z6-mN-Z7-mN-Z8-mN-Z9-mN corresponds to nucleosides ten to twenty of the sense strand, in a 5′ to 3′ direction.

[0144] In some embodiments, the sense strand comprises at least two contiguous 2′ O-methyl modified nucleosides. In some instances, the at least two contiguous 2′ O-methyl modified nucleosides is 3, 4, 5, 6, 7, 8, 9, 10, 11, 12 contiguous 2′ O-methyl modified nucleosides.

[0145] In some embodiments, the antisense strand of the siRNA comprises one or more 2′ O-methyl modified nucleosides. In some instances, the one or more 2′ O-methyl modified nucleosides of the antisense strand is about 1, 2, 3, 4, 5, 6, 7, 8, 9, 10, 11, 12, 13, 14, 15, 16, 17, 18, 19, 20, or 21 2′ O-methyl modified nucleosides. In some instances, the nucleotide at position 1, 2, 3, 4, 5, 6, 7, 8, 9, 10, 11, 12, 13, 14, 15, 16, 17, 18, 19, 20, or 21, or a combination thereof, of the antisense strand comprises the 2′ O-methyl modified nucleoside, in a 5′ to 3′ direction. In some instances, the nucleotide at position 1, 3, 4, 5, 7, 8, 9, 10, 11, 12, 13, 15, 17, 18, 19, 20, or 21, or a combination thereof, of the antisense strand comprises the 2′ O-methyl modified nucleoside, in a 5′ to 3′ direction. In some instances, the first, third, fifth, seventh, eleventh, twelfth, thirteenth, fifteenth, seventeenth, nineteenth, twentieth, and twenty-first nucleosides of the antisense strand comprises the 2′ O-methyl modified nucleoside, in a 5′ to 3′ direction.

[0146] In some embodiments, the antisense strand comprises at least two contiguous 2′ O-methyl modified nucleosides. In some instances, the at least two contiguous 2′ O-methyl modified nucleosides is 3, 4, 5, 6, or 7 contiguous 2′ O-methyl modified nucleosides.

[0147] In some embodiments, the antisense strand comprises a first sequence comprising at least two contiguous 2′ O-methyl modified nucleosides and a second sequence comprising at least two contiguous 2′ O-methyl modified nucleosides. In some instances, the first sequence comprises at least three contiguous 2′ O-methyl modified nucleosides, and the second sequence comprises at least three contiguous 2′ O-methyl modified nucleosides. In some instances, the first sequence comprises three contiguous 2′ O-methyl modified nucleosides, and the second sequence comprises three contiguous 2′ O-methyl modified nucleosides. In some instances, the first sequence comprises four contiguous 2′ O-methyl modified nucleosides, and the second sequence comprises five contiguous 2′ O-methyl modified nucleosides. In some instances, the first sequence comprises seven contiguous 2′ O-methyl modified nucleosides, and the second sequence comprises five contiguous 2′ O-methyl modified nucleosides. In some instances, the first sequence comprises at least four contiguous 2′ O-methyl modified nucleosides. In some instances, the first sequence comprises at least five contiguous 2′ O-methyl modified nucleosides. In some instances, the first sequence comprises at least six contiguous 2′ O-methyl modified nucleosides. In some instances, the first sequence comprises at least seven contiguous 2′ O-methyl modified nucleosides. In some instances, the second sequence comprises at least four contiguous 2′ O-methyl modified nucleosides. In some instances, the second sequence comprises at least five contiguous 2′ O-methyl modified nucleosides. In some instances, the second sequence comprises at least six contiguous 2′ O-methyl modified nucleosides. In some instances, the second sequence comprises at least seven contiguous 2′ O-methyl modified nucleosides.

[0148] 4′- and 5′-modifications. Alkoxy substituents at the 4′ position of 2′deoxyribose mimic the conformation of ribose.

[0149] Bicyclic 2′-4′-modifications. There are a variety of ribose derivatives that lock the carbohydrate ring into the 3′ endo conformation by the formation of bicyclic structures with a bridge between the 2′ oxygen and the 4′ position. The original bicyclic structure can have a methylene bridging group; these are termed locked nucleic acids (LNAs). The bicyclic structure “locks” the ribose into its preferred 3′ endo conformation and increases base pairing affinity. The incorporation of LNAs into a DNA duplex can increase melting points up to 8° C. per LNA. Subsequently, a variety of bicyclic nucleotides have been developed such as Bridged Nucleic Acids (BNAs), Ethyl-bridged (ENAs), constrained ethyl (cEt) nucleic acids and tricyclic structures with varying affinity for target sites. LNAs can be incorporated into antagomirs, splice blocking oligonucleotides, either strand of an RNAi duplex; however, like other 3′ endo conformers, LNAs are not substrates for RNAse H.

[0150] Acyclic nucleic acid analogs: Nucleic acid analogs that have an alternative ribose ring structure have been developed. These include those in which the bond between 2′ and 3′ carbons in the ribose is absent, as well as those containing substitution of the ribose ring with a three-carbon backbone. Examples of acylic nucleic acid analogs include unlocked nucleic acid (UNA) and glycol nucleic acids (GNA). Incorporation of these analogs reduce the melting temperature of the RNAi duplex and can be incorporated into either strand. Incorporation at the 5′ end of the sense strand, or passenger strand, inhibits incorporation into this strand into RISC. Incorporation into the seed region of the antisense strand, or guide strand, can reduce off-target activity. Acyclic nucleic acid analogs may also increase resistance of the RNAi duplex to 3′-exonuclease activity.

[0151] Modification patterns: gapmer overall design. For RNAi duplexes, recognition by RISC requires RNA-like 3′-endo nucleotides and some patterns of RNA analogues. It was observed that a pattern of alternating 2′-O-methyl groups provides stability against nucleases, but not all permutations of alternating 2′-O-methyl are active RNAi agents. The fact that one may remove all 2′-hydroxy groups with alternating 2′-fluoro and 2′-O-methyl groups to produce duplexes that are resistant to nucleases and active in RNAi suggests the 2′-hydroxy group is not absolutely required for activity, but that some sites in the RNAi duplex are sensitive to the added steric bulk of the methyl group.

[0152] In some embodiments, the modified siRNA comprises modified nucleotides including, but not limited to, 2′OMe nucleotides, 2′-deoxy-2′-fluoro (2′F) nucleotides, 2′-deoxy nucleotides, 2′-O-(2-methoxyethyl) (MOE) nucleotides, locked nucleic acid (LNA) nucleotides, and mixtures thereof. In preferred embodiments, the modified siRNA comprises 2′OMe nucleotides (e.g., 2′OMe purine and/or pyrimidine nucleotides) such as, for example, 2′OMe-guanosine nucleotides, 2′OMe-uridine nucleotides, 2′OMe-adenosine nucleotides, 2′OMe-cytosine nucleotides, and mixtures thereof. In some instances, the modified siRNA does not comprise a modification. The modification, for example, comprises 2′OMe-cytosine nucleotides. In some embodiments, the modified siRNA comprises a hairpin loop structure.

[0153] In some embodiments, the modified siRNA comprises natural or synthetic or artificial nucleotide analogues or bases. In some cases, the modified siRNA comprises combinations of DNA, RNA and/or nucleotide analogues. In some instances, the synthetic or artificial nucleotide analogues or bases comprise modifications at one or more of ribose moiety, phosphate moiety, nucleoside moiety, or a combination thereof.

[0154] In some embodiments, nucleotide analogues or artificial nucleotide base comprise a nucleic acid with a modification at a 2′ hydroxyl group of the ribose moiety. In some instances, the modification includes an H, OR, R, halo, SH, SR, NH2, NHR, NR2, or CN, wherein R is an alkyl moiety. Exemplary alkyl moiety includes, but is not limited to, halogens, sulfurs, thiols, thioethers, thioesters, amines (primary, secondary, or tertiary), amides, ethers, esters, alcohols and oxygen. In some instances, the alkyl moiety further comprises a modification. In some instances, the modification comprises an azo group, a keto group, an aldehyde group, a carboxyl group, a nitro group, a nitroso group, a nitrile group, a heterocycle (e.g., imidazole, hydrazino or hydroxylamino) group, an isocyanate or cyanate group, or a sulfur containing group (e.g., sulfoxide, sulfone, sulfide, and disulfide). In some instances, the alkyl moiety further comprises a hetero substitution. In some instances, the carbon of the heterocyclic group is substituted by a nitrogen, oxygen or sulfur. In some instances, the heterocyclic substitution includes but is not limited to, morpholino, imidazole, and pyrrolidino.

[0155] In some instances, the modification at the 2′ hydroxyl group is a 2′-O-methyl modification or a 2′-O-methoxyethyl (2′-O-MOE) modification. In some cases, the 2′-O-methyl modification adds a methyl group to the 2′ hydroxyl group of the ribose moiety whereas the 2′O-methoxyethyl modification adds a methoxyethyl group to the 2′ hydroxyl group of the ribose moiety.

[0156] In some instances, the modification at the 2′ hydroxyl group is a 2′-O-aminopropyl modification in which an extended amine group comprising a propyl linker binds the amine group to the 2′ oxygen. In some instances, this modification neutralizes the phosphate derived overall negative charge of the oligonucleotide molecule by introducing one positive charge from the amine group per sugar and thereby improves cellular uptake properties due to its zwitterionic properties.

[0157] In some instances, the modification at the 2′ hydroxyl group is a locked or bridged ribose modification (e.g., locked nucleic acid or LNA) in which the oxygen molecule bound at the 2′ carbon is linked to the 4′ carbon by a methylene group, thus forming a 2′-C,4′-C-oxy-methylene-linked bicyclic ribonucleotide monomer. Exemplary representations of the chemical structure of LNA are illustrated below. The representation shown to the left highlights the chemical connectivities of an LNA monomer.

[0158] In some instances, the modification at the 2′ hydroxyl group comprises ethylene nucleic acids (ENA) such as for example 2′-4′-ethylene-bridged nucleic acid, which locks the sugar conformation into a C₃′-endo sugar puckering conformation. ENA are part of the bridged nucleic acids class of modified nucleic acids that also comprises LNA.

[0159] In some embodiments, additional modifications at the 2′ hydroxyl group include 2′-deoxy, T-deoxy-2′-fluoro, 2′-O-aminopropyl (2′-O-AP), 2′-O-dimethylaminoethyl (2′-O-DMAOE), 2′-O-dimethylaminopropyl (2′-O-DMAP), T-O-dimethylaminoethyloxyethyl (2′-O-DMAEOE), or 2′-O—N-methylacetamido (2′-O-NMA).

[0160] In some embodiments, nucleotide analogues comprise modified bases such as, but not limited to, 5-propynyluridine, 5-propynylcytidine, 6-methyladenine, 6-methylguanine, N, N, -dimethyladenine, 2-propyladenine, 2propylguanine, 2-aminoadenine, 1-methylinosine, 3-methyluridine, 5-methylcytidine, 5-methyluridine and other nucleotides having a modification at the 5 position, 5-(2-amino) propyl uridine, 5-halocytidine, 5-halouridine, 4-acetylcytidine, 1-methyladenosine, 2-methyladenosine, 3-methylcytidine, 6-methyluridine, 2-methylguanosine, 7-methylguanosine, 2, 2-dimethylguanosine, 5-methylaminoethyluridine, 5-methyloxyuridine, deazanucleotides such as 7-deaza-adenosine, 6-azouridine, 6-azocytidine, 6-azothymidine, 5-methyl-2-thiouridine, other thio bases such as 2-thiouridine and 4-thiouridine and 2-thiocytidine, dihydrouridine, pseudouridine, queuosine, archaeosine, naphthyl and substituted naphthyl groups, any O- and N-alkylated purines and pyrimidines such as N6-methyladenosine, 5-methylcarbonylmethyluridine, uridine 5-oxyacetic acid, pyridine-4-one, pyridine-2-one, phenyl and modified phenyl groups such as aminophenol or 2,4, 6-trimethoxy benzene, modified cytosines that act as G-clamp nucleotides, 8-substituted adenines and guanines, 5-substituted uracils and thymines, azapyrimidines, carboxyhydroxyalkyl nucleotides, carboxyalkylaminoalkyi nucleotides, and alkylcarbonylalkylated nucleotides. Modified nucleotides also include those nucleotides that are modified with respect to the sugar moiety, as well as nucleotides having sugars or analogs thereof that are not ribosyl. For example, the sugar moieties, in some cases are or be based on, mannoses, arabinoses, glucopyranoses, galactopyranoses, 4′-thioribose, and other sugars, heterocycles, or carbocycles. The term nucleotide also includes what are known in the art as universal bases. By way of example, universal bases include but are not limited to 3-nitropyrrole, 5-nitroindole, or nebularine.

[0161] In some embodiments, nucleotide analogues further comprise morpholinos, peptide nucleic acids (PNAs), methylphosphonate nucleotides, thiolphosphonate nucleotides, 2′-fluoro N3-P5′-phosphoramidites, 1′, 5′-anhydrohexitol nucleic acids (HNAs), or a combination thereof. Morpholino or phosphorodiamidate morpholino oligo (PMO) comprises synthetic molecules whose structure mimics natural nucleic acid structure by deviates from the normal sugar and phosphate structures. In some instances, the five-member ribose ring is substituted with a six-member morpholino ring containing four carbons, one nitrogen and one oxygen. In some cases, the ribose monomers are linked by a phosphorodiamidate group instead of a phosphate group. In such cases, the backbone alterations remove all positive and negative charges making morpholinos neutral molecules capable of crossing cellular membranes without the aid of cellular delivery agents such as those used by charged oligonucleotides.

[0162] In some embodiments, peptide nucleic acid (PNA) does not contain sugar ring or phosphate linkage and the bases are attached and appropriately spaced by oligoglycine-like molecules, therefore, eliminating a backbone charge.

[0163] In some embodiments, one or more modifications optionally occur at the internucleotide linkage. In some instances, modified internucleotide linkage include, but is not limited to, phosphorothioates, phosphorodithioates, methylphosphonates, 5′-alkylenephosphonates, 5′-methylphosphonate, 3′-alkylene phosphonates, borontrifluoridates, borano phosphate esters and selenophosphates of 3′-5′linkage or 2′-5′linkage, phosphotriesters, thionoalkylphosphotriesters, hydrogen phosphonate linkages, alkyl phosphonates, alkylphosphonothioates, arylphosphonothioates, phosphoroselenoates, phosphorodiselenoates, phosphinates, phosphoramidates, 3′-alkylphosphoramidates, aminoalkylphosphoramidates, thionophosphoramidates, phosphoropiperazidates, phosphoroanilothioates, phosphoroanilidates, ketones, sulfones, sulfonamides, carbonates, carbamates, methylenehydrazos, methylenedimethylhydrazos, formacetals, thioformacetals, oximes, methyleneiminos, methylenemethyliminos, thioamidates, linkages with riboacetyl groups, aminoethyl glycine, silyl or siloxane linkages, alkyl or cycloalkyl linkages with or without heteroatoms of, for example, 1 to 10 carbons that are saturated or unsaturated and/or substituted and/or contain heteroatoms, linkages with morpholino structures, amides, polyamides wherein the bases are attached to the aza nitrogens of the backbone directly or indirectly, and combinations thereof. Phosphorothioate antisense oligonucleotides (PS ASO) are antisense oligonucleotides comprising a phosphorothioate linkage.

[0164] In some instances, the modification is a methyl or thiol modification such as methylphosphonate or thiolphosphonate modification.

[0165] In some instances, a modified nucleotide includes, but is not limited to, 2′-fluoro N3-P5′-phosphoramidites.

[0166] In some instances, a modified nucleotide includes, but is not limited to, hexitol nucleic acid (or 1′, 5′-anhydrohexitol nucleic acids (HNA)).

[0167] In some embodiments, one or more modifications further optionally include modifications of the ribose moiety, phosphate backbone and the nucleoside, or modifications of the nucleotide analogues at the 3′ or the 5′ terminus. For example, the 3′ terminus optionally include a 3′ cationic group, or by inverting the nucleoside at the 3′-terminus with a 3′-3′ linkage. In another alternative, the 3′-terminus is optionally conjugated with an aminoalkyl group, e.g., a 3′ C5-aminoalkyl dT. In an additional alternative, the 3′-terminus is optionally conjugated with an abasic site, e.g., with an apurinic or apyrimidinic site. In some instances, the 5′-terminus is conjugated with an aminoalkyl group, e.g., a 5′-O-alkylamino substituent. In some cases, the 5′-terminus is conjugated with an abasic site, e.g., with an apurinic or apyrimidinic site.

[0168] In some embodiments, the modified siRNA comprises one or more of the artificial nucleotide analogues described herein. In some instances, the modified siRNA comprises 1, 2, 3, 4, 5, 6, 7, 8, 9, 10, 11, 12, 13, 14, 15, 16, 17, 18, 20, 25, or more of the artificial nucleotide analogues described herein. In some embodiments, the artificial nucleotide analogues include 2′-O-methyl, 2′-O-methoxyethyl (2′-O-MOE), 2′-O-aminopropyl, 2′-deoxy, T-deoxy-2′-fluoro, 2′-O-aminopropyl (2′-O-AP), 2′-O-dimethylaminoethyl (2′-O-DMAOE), 2′-O-dimethylaminopropyl (2′-O-DMAP), T-O-dimethylaminoethyloxyethyl (2′-O-DMAEOE), or 2′-O—N-methylacetamido (2′-O-NMA) modified, LNA, ENA, PNA, HNA, morpholino, methylphosphonate nucleotides, thiolphosphonate nucleotides, 2′-fluoro N3-P5′-phosphoramidites, or a combination thereof. In some instances, the modified siRNA comprises 1, 2, 3, 4, 5, 6, 7, 8, 9, 10, 11, 12, 13, 14, 15, 16, 17, 18, 20, 25, or more of the artificial nucleotide analogues selected from 2′-O-methyl, 2′-O-methoxyethyl (2′-O-MOE), 2′-O-aminopropyl, 2′-deoxy, T-deoxy-2′-fluoro, 2′-O-aminopropyl (2′-O-AP), 2′-O-dimethylaminoethyl (2′-O-DMAOE), 2′-O-dimethylaminopropyl (2′-O-DMAP), T-O-dimethylaminoethyloxyethyl (2′-O-DMAEOE), or 2′-O—N-methylacetamido (2′-O-NMA) modified, LNA, ENA, PNA, HNA, morpholino, methylphosphonate nucleotides, thiolphosphonate nucleotides, 2′-fluoro N3-P5′-phosphoramidites, or a combination thereof. In some instances, the modified siRNA comprises 1, 2, 3, 4, 5, 6, 7, 8, 9, 10, 11, 12, 13, 14, 15, 16, 17, 18, 20, 25, or more of 2′-O-methyl modified nucleotides. In some instances, the modified siRNA comprises 1, 2, 3, 4, 5, 6, 7, 8, 9, 10, 11, 12, 13, 14, 15, 16, 17, 18, 20, 25, or more of 2′-O-methoxyethyl (2′-O-MOE) modified nucleotides. In some instances, the modified siRNA comprises 1, 2, 3, 4, 5, 6, 7, 8, 9, 10, 11, 12, 13, 14, 15, 16, 17, 18, 20, 25, or more of thiolphosphonate nucleotides.

[0169] The modified siRNA, in some embodiments, has an IC50 less than or equal to ten-fold that of the corresponding unmodified siRNA (i.e., the modified siRNA has an IC50 that is less than or equal to ten-times the IC50 of the corresponding unmodified siRNA). In some embodiments, the modified siRNA has an IC50 less than or equal to three-fold that of the corresponding unmodified siRNA. In yet other embodiments, the modified siRNA preferably has an IC50 less than or equal to two-fold that of the corresponding unmodified siRNA. In some embodiments, the modified siRNA has an IC50 of less than or equal to 10-fold, 9-fold, 8-fold, 7-fold, 6-fold, 5-fold, 4-fold, 3-fold, 2-fold, or 1.5-fold compared to the IC50 of a corresponding unmodified siRNA. It will be readily apparent to those of skill in the art that a dose response curve can be generated and the IC50 values for the modified siRNA and the corresponding unmodified siRNA can be readily determined using methods known to those of skill in the art.

[0170] The modified siRNA described herein may have 3′ overhangs. In some embodiments, the 3′ overhangs comprises at least or about 1, 2, 3, 4, 5, 6, 7, 8, 9, 10 or more than 10 nucleotides on one or both sides of the double-stranded region. In some embodiments, the modified siRNA lacks overhangs (i.e., have blunt ends). In some embodiments, the modified siRNA has 3′ overhangs of two nucleotides on each side of the double-stranded region. In some embodiments, the 3′ overhang on the antisense strand has complementarity to the target sequence and the 3′ overhang on the sense strand has complementarity to the complementary strand of the target sequence. Alternatively, or in combination, the 3′ overhangs do not have complementarity to the target sequence or the complementary strand thereof. In some embodiments, the 3′ overhangs comprise at least or about 1, 2, 3, 4, 5, 6, 7, 8, 9, 10 or more than 10 nucleotides such as 2′-deoxy(2′H) nucleotides. In some embodiments, the 3′ overhangs comprise deoxythymidine (dT) nucleotides.

[0171] Typically, the modified siRNA comprises from about 1% to about 100% (e.g., about 1%, 5%, 10%, 15%, 20%, 25%, 30%, 35%, 40%, 45%, 50%, 55%, 60%, 65%, 70%, 75%, 80%, 85%, 90%, 95%, or 100%) modified nucleotides in the double-stranded region of the siRNA duplex. In preferred embodiments, less than about 30% (e.g., less than about 30%, 25%, 20%, 15%, 10%, or 5%) or from about 1% to about 30% (e.g., from about 1%-30%, 5%-30%, 10%-30%, 15%-30%, 20%-30%, or 25%-30%) of the nucleotides in the double-stranded region comprise modified nucleotides. In some instances, the modified siRNA comprises at least one of: from about 5% to about 100% modification, from about 10% to about 100% modification, from about 20% to about 100% modification, from about 30% to about 100% modification, from about 40% to about 100% modification, from about 50% to about 100% modification, from about 60% to about 100% modification, from about 70% to about 100% modification, from about 80% to about 100% modification, and from about 90% to about 100% modification.

[0172] In some embodiments, the modified siRNA does not comprise phosphate backbone modifications, e.g., in the sense and/or antisense strand of the double-stranded region. In some embodiments, the modified siRNA does not comprise 2′-deoxy nucleotides, e.g., in the sense and/or antisense strand of the double-stranded region. In some embodiments, the nucleotide at the 3′-end of the double-stranded region in the sense and/or antisense strand is not a modified nucleotide. In certain other instances, the nucleotides near the 3′-end (e.g., within one, two, three, or four nucleotides of the 3′-end) of the double-stranded region in the sense and/or antisense strand are not modified nucleotides.

[0173] The modified siRNA described herein may have 3′ overhangs of one, two, three, four, or more nucleotides on one or both sides of the double-stranded region, or may lack overhangs (i.e., have blunt ends). Preferably, the modified siRNA has 3′ overhangs of two nucleotides on each side of the double-stranded region. In some embodiments, the 3′ overhangs comprise one, two, three, four, or more nucleotides such as 2′-deoxy(2′H) nucleotides. Preferably, the 3′ overhangs comprise deoxythymidine (dT) nucleotides.

[0174] The dsRNA may also have a blunt end, located at the 5′-end of the antisense strand (or the 3′-end of the sense strand) or vice versa. Generally, the antisense strand of the dsRNA has a nucleotide overhang at the 3′-end, and the 5′-end is blunt. While not bound by theory, the asymmetric blunt end at the 5′-end of the antisense strand and 3′-end overhang of the antisense strand favor the guide strand loading into RISC process.

[0175] In some embodiments, the dsRNA agent described herein may also have two blunt ends, at both ends of the dsRNA duplex.

[0176] In some embodiments, every nucleotide in the sense strand and antisense strand of the dsRNA agent, including the nucleotides that are part of the motifs, may be modified. Each nucleotide may be modified with the same or different modification which can include one or more alteration of one or both of the non-linking phosphate oxygens and/or of one or more of the linking phosphate oxygens; alteration of a constituent of the ribose sugar, e.g., of the 2′ hydroxyl on the ribose sugar; wholesale replacement of the phosphate moiety with “dephospho” linkers; modification or replacement of a naturally occurring base; and replacement or modification of the ribose-phosphate backbone.

[0177] As nucleic acids are polymers of subunits, many of the modifications occur at a position which is repeated within a nucleic acid, e.g., a modification of a base, or a phosphate moiety, or a non-linking O of a phosphate moiety. In some cases, the modification will occur at all of the subject positions in the nucleic acid but in some cases it will not. By way of example, a modification may only occur at a 3′ or 5′ terminal position, may only occur in a terminal region, e.g., at a position on a terminal nucleotide or in the last 2, 3, 4, 5, or 10 nucleotides of a strand. A modification may occur in a double strand region, a single strand region, or in both. A modification may occur only in the double strand region of an RNA or may only occur in a single strand region of a RNA. E.g., a phosphorothioate modification at a non-linking O position may only occur at one or both termini, may only occur in a terminal region, e.g., at a position on a terminal nucleotide or in the last 2, 3, 4, 5, or 10 nucleotides of a strand, or may occur in double strand and single strand regions, particularly at termini. The 5′ end or ends can be phosphorylated.

[0178] It may be possible, e.g., to enhance stability, to include particular bases in overhangs, or to include modified nucleotides or nucleotide surrogates, in single strand overhangs, e.g., in a 5′ or 3′ overhang, or in both. E.g., it can be desirable to include purine nucleotides in overhangs. In some embodiments all or some of the bases in a 3′ or 5′ overhang may be modified, e.g., with a modification described herein. Modifications can include, e.g., the use of modifications at the 2′ position of the ribose sugar with modifications that are known in the art, e.g., the use of deoxyribonucleotides, 2′-deoxy-2′-fluoro (2′-F) or 2′-O-methyl modified instead of the ribosugar of the nucleobase, and modifications in the phosphate group, e.g., phosphorothioate modifications. Overhangs need not be homologous with the target sequence.

[0179] In some embodiments, each residue of the sense strand and antisense strand is independently modified with LNA, HNA, CeNA, 2′-methoxyethyl, 2′-O-methyl, 2′-O-allyl, 2′-C-allyl, 2′-deoxy, or 2′-fluoro. The strands can contain more than one modification. In some embodiments, each residue of the sense strand and antisense strand is independently modified with 2′-O-methyl or 2′-fluoro.

[0180] At least two different modifications are typically present on the sense strand and antisense strand. Those two modifications may be the 2′-O-methyl or 2′-fluoro modifications, or others.

[0181] In some embodiments, the sense strand and antisense strand each contains two differently modified nucleotides selected from 2′-O-methyl or 2′-fluoro.

[0182] In some embodiments, each residue of the sense strand and antisense strand is independently modified with 2′-O-methyl nucleotide, 2′-deoxyfluoro nucleotide, 2-O—N-methylacetamido (2′-O-NMA) nucleotide, a 2′-O-dimethylaminoethoxyethyl (2′-O-DMAEOE) nucleotide, 2′-O-aminopropyl (2′-O-AP) nucleotide, or 2′-ara-F nucleotide.

[0183] The type of modifications contained in the alternating motif may be the same or different. For example, if A, B, C, D each represent one type of modification on the nucleotide, the alternating pattern, i.e., modifications on every other nucleotide, may be the same, but each of the sense strand or antisense strand can be selected from several possibilities of modifications within the alternating motif such as “ABABAB . . . ”, “AC AC AC . . . ” “BDBDBD . . . ” or “CDCDCD . . . ,” etc.

[0184] In some embodiments, the dsRNA agent described herein comprises the modification pattern for the alternating motif on the sense strand relative to the modification pattern for the alternating motif on the antisense strand is shifted. The shift may be such that the modified group of nucleotides of the sense strand corresponds to a differently modified group of nucleotides of the antisense strand and vice versa. For example, the sense strand when paired with the antisense strand in the dsRNA duplex, the alternating motif in the sense strand may start with “ABABAB” from 5′-3′ of the strand and the alternating motif in the antisense strand may start with “BABABA” from 3′-5 Of the strand within the duplex region. As another example, the alternating motif in the sense strand may start with “AABBAABB” from 5′-3′ of the strand and the alternating motif in the antisense strand may start with “BBAABBAA” from 3′-5 of the strand within the duplex region, so that there is a complete or partial shift of the modification patterns between the sense strand and the antisense strand.

[0185] In some embodiments, the dsRNA agent described herein comprises the pattern of the alternating motif of 2′-O-methyl modification and 2′-F modification on the sense strand initially has a shift relative to the pattern of the alternating motif of 2′-O-methyl modification and 2′-F modification on the antisense strand initially, i.e., the 2′-O-methyl modified nucleotide on the sense strand base pairs with a 2′-F modified nucleotide on the antisense strand and vice versa. The 1 position of the sense strand may start with the 2′-F modification, and the 1 position of the antisense strand may start with the 2′-O-methyl modification. The introduction of one or more motifs of three identical modifications on three consecutive nucleotides to the sense strand and/or antisense strand interrupts the initial modification pattern present in the sense strand and/or antisense strand. This interruption of the modification pattern of the sense and/or antisense strand by introducing one or more motifs of three identical modifications on three consecutive nucleotides to the sense and/or antisense strand surprisingly enhances the gene silencing activity to the target gene.

[0186] The dsRNA agent described herein may further comprise at least one phosphorothioate or methylphosphonate internucleotide linkage. The phosphorothioate or methylphosphonate internucleotide linkage modification may occur on any nucleotide of the sense strand or antisense strand or both in any position of the strand. For instance, the internucleotide linkage modification may occur on every nucleotide on the sense strand and/or antisense strand; each internucleotide linkage modification may occur in an alternating pattern on the sense strand or antisense strand; or the sense strand or antisense strand comprises both internucleotide linkage modifications in an alternating pattern. The alternating pattern of the internucleotide linkage modification on the sense strand may be the same or different from the antisense strand, and the alternating pattern of the internucleotide linkage modification on the sense strand may have a shift relative to the alternating pattern of the internucleotide linkage modification on the antisense strand.

[0187] In some embodiments, the dsRNA comprises the phosphorothioate or methylphosphonate internucleotide linkage modification in the overhang region. For example, the overhang region comprises two nucleotides having a phosphorothioate or methylphosphonate internucleotide linkage between the two nucleotides. Internucleotide linkage modifications also may be made to link the overhang nucleotides with the terminal paired nucleotides within duplex region. For example, at least 2, 3, 4, or all the overhang nucleotides may be linked through phosphorothioate or methylphosphonate internucleotide linkage, and optionally, there may be additional phosphorothioate or methylphosphonate internucleotide linkages linking the overhang nucleotide with a paired nucleotide that is next to the overhang nucleotide. For instance, there may be at least two phosphorothioate internucleotide linkages between the terminal three nucleotides, in which two of the three nucleotides are overhang nucleotides, and the third is a paired nucleotide next to the overhang nucleotide. Preferably, these terminal three nucleotides may be at the 3′-end of the antisense strand.

[0188] In some embodiments the sense strand of the dsRNA comprises 1-10 blocks of two to ten phosphorothioate or methylphosphonate internucleotide linkages separated by 1, 2, 3, 4, 5, 6, 7, 8, 9, 10, 11, 12, 13, 14, 15 or 16 phosphate internucleotide linkages, wherein one of the phosphorothioate or methylphosphonate internucleotide linkages is placed at any position in the oligonucleotide sequence and the said sense strand is paired with an antisense strand comprising any combination of phosphorothioate, methylphosphonate and phosphate internucleotide linkages or an antisense strand comprising either phosphorothioate or methylphosphonate or phosphate linkage.

[0189] In some embodiments the antisense strand of the dsRNA comprises two blocks of two phosphorothioate or methylphosphonate internucleotide linkages separated by 1, 2, 3, 4, 5, 6, 7, 8, 9, 10, 11, 12, 13, 14, 15, 16, 17, or 18 phosphate internucleotide linkages, wherein one of the phosphorothioate or methylphosphonate internucleotide linkages is placed at any position in the oligonucleotide sequence and the said antisense strand is paired with a sense strand comprising any combination of phosphorothioate, methylphosphonate and phosphate internucleotide linkages or an antisense strand comprising either phosphorothioate or methylphosphonate or phosphate linkage.

[0190] In some embodiments the antisense strand of the dsRNA comprises two blocks of three phosphorothioate or methylphosphonate internucleotide linkages separated by 1, 2, 3, 4, 5, 6, 7, 8, 9, 10, 11, 12, 13, 14, 15 or 16 phosphate internucleotide linkages, wherein one of the phosphorothioate or methylphosphonate internucleotide linkages is placed at any position in the oligonucleotide sequence and the said antisense strand is paired with a sense strand comprising any combination of phosphorothioate, methylphosphonate and phosphate internucleotide linkages or an antisense strand comprising either phosphorothioate or methylphosphonate or phosphate linkage.

[0191] In some embodiments the antisense strand of the dsRNA comprises two blocks of four phosphorothioate or methylphosphonate internucleotide linkages separated by 1, 2, 3, 4, 5, 6, 7, 8, 9, 10, 11, 12, 13 or 14 phosphate internucleotide linkages, wherein one of the phosphorothioate or methylphosphonate internucleotide linkages is placed at any position in the oligonucleotide sequence and the said antisense strand is paired with a sense strand comprising any combination of phosphorothioate, methylphosphonate and phosphate internucleotide linkages or an antisense strand comprising either phosphorothioate or methylphosphonate or phosphate linkage.

[0192] In some embodiments the antisense strand of the dsRNA comprises two blocks of five phosphorothioate or methylphosphonate internucleotide linkages separated by 1, 2, 3, 4, 5, 6, 7, 8, 9, 10, 11 or 12 phosphate internucleotide linkages, wherein one of the phosphorothioate or methylphosphonate internucleotide linkages is placed at any position in the oligonucleotide sequence and the said antisense strand is paired with a sense strand comprising any combination of phosphorothioate, methylphosphonate and phosphate internucleotide linkages or an antisense strand comprising either phosphorothioate or methylphosphonate or phosphate linkage.

[0193] In some embodiments the antisense strand of the dsRNA comprises two blocks of six phosphorothioate or methylphosphonate internucleotide linkages separated by 1, 2, 3, 4, 5, 6, 7, 8, 9 or 10 phosphate internucleotide linkages, wherein one of the phosphorothioate or methylphosphonate internucleotide linkages is placed at any position in the oligonucleotide sequence and the said antisense strand is paired with a sense strand comprising any combination of phosphorothioate, methylphosphonate and phosphate internucleotide linkages or an antisense strand comprising either phosphorothioate or methylphosphonate or phosphate linkage.

[0194] In some embodiments the antisense strand of the dsRNA comprises two blocks of seven phosphorothioate or methylphosphonate internucleotide linkages separated by 1, 2, 3, 4, 5, 6, 7 or 8 phosphate internucleotide linkages, wherein one of the phosphorothioate or methylphosphonate internucleotide linkages is placed at any position in the oligonucleotide sequence and the said antisense strand is paired with a sense strand comprising any combination of phosphorothioate, methylphosphonate and phosphate internucleotide linkages or an antisense strand comprising either phosphorothioate or methylphosphonate or phosphate linkage.

[0195] In some embodiments the antisense strand of the dsRNA comprises two blocks of eight phosphorothioate or methylphosphonate internucleotide linkages separated by 1, 2, 3, 4, 5 or 6 phosphate internucleotide linkages, wherein one of the phosphorothioate or methylphosphonate internucleotide linkages is placed at any position in the oligonucleotide sequence and the said antisense strand is paired with a sense strand comprising any combination of phosphorothioate, methylphosphonate and phosphate internucleotide linkages or an antisense strand comprising either phosphorothioate or methylphosphonate or phosphate linkage.

[0196] In some embodiments the antisense strand of the dsRNA comprises two blocks of nine phosphorothioate or methylphosphonate internucleotide linkages separated by 1, 2, 3 or 4 phosphate internucleotide linkages, wherein one of the phosphorothioate or methylphosphonate internucleotide linkages is placed at any position in the oligonucleotide sequence and the said antisense strand is paired with a sense strand comprising any combination of phosphorothioate, methylphosphonate and phosphate internucleotide linkages or an antisense strand comprising either phosphorothioate or methylphosphonate or phosphate linkage.

[0197] In some embodiments, the dsRNA described herein further comprises one or more phosphorothioate or methylphosphonate internucleotide linkage modification within 1-10 of the termini position(s) of the sense and/or antisense strand. For example, at least 2, 3, 4, 5, 6, 7, 8, 9 or 10 nucleotides may be linked through phosphorothioate or methylphosphonate internucleotide linkage at one end or both ends of the sense and/or antisense strand.

[0198] In some embodiments, the dsRNA described herein further comprises one or more phosphorothioate or methylphosphonate internucleotide linkage modification within 1-10 of the internal region of the duplex of each of the sense and/or antisense strand. For example, at least 2, 3, 4, 5, 6, 7, 8, 9 or 10 nucleotides may be linked through phosphorothioate methylphosphonate internucleotide linkage at position 8-16 of the duplex region counting from the 5′-end of the sense strand; the dsRNA can optionally further comprise one or more phosphorothioate or methylphosphonate internucleotide linkage modification within 1-10 of the termini position(s).

[0199] In some embodiments, the dsRNA described herein further comprises one to five phosphorothioate or methylphosphonate internucleotide linkage modification(s) within position 1-5 and one to five phosphorothioate or methylphosphonate internucleotide linkage modification(s) within position 18-23 of the sense strand (counting from the 5′-end), and one to five phosphorothioate or methylphosphonate internucleotide linkage modification at positions 1 and 2 and one to five within positions 18-23 of the antisense strand (counting from the 5′-end).

[0200] In some embodiments, the dsRNA described herein further comprises one phosphorothioate internucleotide linkage modification within position 1-5 and one phosphorothioate or methylphosphonate internucleotide linkage modification within position 18-23 of the sense strand (counting from the 5′-end), and one phosphorothioate internucleotide linkage modification at positions 1 and 2 and two phosphorothioate or methylphosphonate internucleotide linkage modifications within positions 18-23 of the antisense strand (counting from the 5′-end).

[0201] In some embodiments, the dsRNA described herein further comprises two phosphorothioate internucleotide linkage modifications within position 1-5 and one phosphorothioate internucleotide linkage modification within position 18-23 of the sense strand (counting from the 5′-end), and one phosphorothioate internucleotide linkage modification at positions 1 and 2 and two phosphorothioate internucleotide linkage modifications within positions 18-23 of the antisense strand (counting from the 5′-end).

[0202] In some embodiments, the dsRNA described herein further comprises two phosphorothioate internucleotide linkage modifications within position 1-5 and two phosphorothioate internucleotide linkage modifications within position 18-23 of the sense strand (counting from the 5′-end), and one phosphorothioate internucleotide linkage modification at positions 1 and 2 and two phosphorothioate internucleotide linkage modifications within positions 18-23 of the antisense strand (counting from the 5′-end). In some embodiments, the dsRNA described herein further comprises two phosphorothioate internucleotide linkage modifications within position 1-5 and two phosphorothioate internucleotide linkage modifications within position 18-23 of the sense strand (counting from the 5′-end), and one phosphorothioate internucleotide linkage modification at positions 1 and 2 and one phosphorothioate internucleotide linkage modification within positions 18-23 of the antisense strand (counting from the 5′-end).

[0203] In some embodiments, the dsRNA described herein further comprises one phosphorothioate internucleotide linkage modification within position 1-5 and one phosphorothioate internucleotide linkage modification within position 18-23 of the sense strand (counting from the 5′-end), and two phosphorothioate internucleotide linkage modifications at positions 1 and 2 and two phosphorothioate internucleotide linkage modifications within positions 18-23 of the antisense strand (counting from the 5′-end).

[0204] In some embodiments, the dsRNA described herein further comprises one phosphorothioate internucleotide linkage modification within position 1-5 and one within position 18-23 of the sense strand (counting from the 5′-end), and two phosphorothioate internucleotide linkage modification at positions 1 and 2 and one phosphorothioate internucleotide linkage modification within positions 18-23 of the antisense strand (counting from the 5′-end).

[0205] In some embodiments, the dsRNA described herein further comprises one phosphorothioate internucleotide linkage modification within position 1-5 (counting from the 5′-end), and two phosphorothioate internucleotide linkage modifications at positions 1 and 2 and one phosphorothioate internucleotide linkage modification within positions 18-23 of the antisense strand (counting from the 5′-end).

[0206] In some embodiments, the dsRNA described herein further comprises two phosphorothioate internucleotide linkage modifications within position 1-5 (counting from the 5′-end), and one phosphorothioate internucleotide linkage modification at positions 1 and 2 and two phosphorothioate internucleotide linkage modifications within positions 18-23 of the antisense strand (counting from the 5′-end).

[0207] In some embodiments, the dsRNA described herein further comprises two phosphorothioate internucleotide linkage modifications within position 1-5 and one within position 18-23 of the sense strand (counting from the 5′-end), and two phosphorothioate internucleotide linkage modifications at positions 1 and 2 and one phosphorothioate internucleotide linkage modification within positions 18-23 of the antisense strand (counting from the 5′-end).

[0208] In some embodiments, the dsRNA described herein further comprises two phosphorothioate internucleotide linkage modifications within position 1-5 and one phosphorothioate internucleotide linkage modification within position 18-23 of the sense strand (counting from the 5′-end), and two phosphorothioate internucleotide linkage modifications at positions 1 and 2 and two phosphorothioate internucleotide linkage modifications within positions 18-23 of the antisense strand (counting from the 5′-end).

[0209] In some embodiments, the dsRNA described herein further comprises two phosphorothioate internucleotide linkage modifications within position 1-5 and one phosphorothioate internucleotide linkage modification within position 18-23 of the sense strand (counting from the 5′-end), and one phosphorothioate internucleotide linkage modification at positions 1 and 2 and two phosphorothioate internucleotide linkage modifications within positions 18-23 of the antisense strand (counting from the 5′-end).

[0210] In some embodiments, the dsRNA described herein further comprises two phosphorothioate internucleotide linkage modifications at position 1 and 2, and two phosphorothioate internucleotide linkage modifications at position 20 and 21 of the sense strand (counting from the 5′-end), and one phosphorothioate internucleotide linkage modification at positions 1 and one at position 21 of the antisense strand (counting from the 5′-end).

[0211] In some embodiments, the dsRNA described herein further comprises one phosphorothioate internucleotide linkage modification at position 1, and one phosphorothioate internucleotide linkage modification at position 21 of the sense strand (counting from the 5′-end), and two phosphorothioate internucleotide linkage modifications at positions 1 and 2 and two phosphorothioate internucleotide linkage modifications at positions 20 and 21 the antisense strand (counting from the 5′-end).

[0212] In some embodiments, the dsRNA described herein further comprises two phosphorothioate internucleotide linkage modifications at position 1 and 2, and two phosphorothioate internucleotide linkage modifications at position 21 and 22 of the sense strand (counting from the 5′-end), and one phosphorothioate internucleotide linkage modification at positions 1 and one phosphorothioate internucleotide linkage modification at position 21 of the antisense strand (counting from the 5′-end).

[0213] In some embodiments, the dsRNA described herein further comprises one phosphorothioate internucleotide linkage modification at position 1, and one phosphorothioate internucleotide linkage modification at position 21 of the sense strand (counting from the 5′-end), and two phosphorothioate internucleotide linkage modifications at positions 1 and 2 and two phosphorothioate internucleotide linkage modifications at positions 21 and 22 the antisense strand (counting from the 5′-end).

[0214] In some embodiments, the dsRNA described herein further comprises two phosphorothioate internucleotide linkage modifications at position 1 and 2, and two phosphorothioate internucleotide linkage modifications at position 22 and 23 of the sense strand (counting from the 5′-end), and one phosphorothioate internucleotide linkage modification at positions 1 and one phosphorothioate internucleotide linkage modification at position 21 of the antisense strand (counting from the 5′-end).

[0215] In some embodiments, the dsRNA described herein further comprises one phosphorothioate internucleotide linkage modification at position 1, and one phosphorothioate internucleotide linkage modification at position 21 of the sense strand (counting from the 5′-end), and two phosphorothioate internucleotide linkage modifications at positions 1 and 2 and two phosphorothioate internucleotide linkage modifications at positions 23 and 23 the antisense strand (counting from the 5′-end).

[0216] In some embodiments, the dsRNA agent described herein comprises mismatch(es) with the target, within the duplex, or combinations thereof. The mismatch can occur in the overhang region or the duplex region. The base pair can be ranked on the basis of their propensity to promote dissociation or melting (e.g., on the free energy of association or dissociation of a particular pairing, the simplest approach is to examine the pairs on an individual pair basis, though next neighbor or similar analysis can also be used). In terms of promoting dissociation: A:U is preferred over G:C; G:U is preferred over G:C; and I:C is preferred over G:C (I=inosine). Mismatches, e.g., non-canonical or other than canonical pairings (as described elsewhere herein) are preferred over canonical (A:T, A:U, G:C) pairings; and pairings which include a universal base are preferred over canonical pairings. In some embodiments, the dsRNA agent described herein comprises at least one of the first 1, 2, 3, 4, or 5 base pairs within the duplex regions from the 5′-end of the antisense strand can be chosen independently from the group of: A:U, G:U, I:C, and mismatched pairs, e.g., non-canonical or other than canonical pairings or pairings which include a universal base, to promote the dissociation of the antisense strand at the 5′-end of the duplex.

[0217] In some embodiments, the nucleotide at the 1 position within the duplex region from the 5′-end in the antisense strand is selected from the group consisting of A, dA, dU, U, and dT. Alternatively, at least one of the first 1, 2 or 3 base pair within the duplex region from the 5′-end of the antisense strand is an AU base pair. For example, the first base pair within the duplex region from the 5′-end of the antisense strand is an AU base pair.

[0218] The dsRNA agent that contains conjugations of one or more carbohydrate moieties to a dsRNA agent can optimize one or more properties of the dsRNA agent. In many cases, the carbohydrate moiety will be attached to a modified subunit of the dsRNA agent. E.g., the ribose sugar of one or more ribonucleotide subunits of a dsRNA agent can be replaced with another moiety, e.g., a non-carbohydrate (preferably cyclic) carrier to which is attached a carbohydrate ligand. A ribonucleotide subunit in which the ribose sugar of the subunit has been so replaced is referred to herein as a ribose replacement modification subunit (RRMS). A cyclic carrier may be a carbocyclic ring system, i.e., all ring atoms are carbon atoms, or a heterocyclic ring system, i.e., one or more ring atoms may be a heteroatom, e.g., nitrogen, oxygen, sulfur. The cyclic carrier may be a monocyclic ring system, or may contain two or more rings, e.g. fused rings. The cyclic carrier may be a fully saturated ring system, or it may contain one or more double bonds.

[0219] The ligand may be attached to the polynucleotide via a carrier. The carriers include (i) at least one “backbone attachment point,” preferably two “backbone attachment points” and (ii) at least one “tethering attachment point.” A “backbone attachment point” as used herein refers to a functional group, e.g. a hydroxyl group, or generally, a bond available for, and that is suitable for incorporation of the carrier into the backbone, e.g., the phosphate, or modified phosphate, e.g., sulfur containing, backbone, of a ribonucleic acid. A “tethering attachment point” (TAP) in some embodiments refers to a constituent ring atom of the cyclic carrier, e.g., a carbon atom or a heteroatom (distinct from an atom which provides a backbone attachment point), that connects a selected moiety. The moiety can be, e.g., a carbohydrate, e.g. monosaccharide, disaccharide, trisaccharide, tetrasaccharide, oligosaccharide and polysaccharide.

[0220] Optionally, the selected moiety is connected by an intervening tether to the cyclic carrier. Thus, the cyclic carrier will often include a functional group, e.g., an amino group, or generally, provide a bond, that is suitable for incorporation or tethering of another chemical entity, e.g., a ligand to the constituent ring.

[0221] In some embodiments the dsRNA described herein is conjugated to a ligand via a carrier, wherein the carrier can be cyclic group or acyclic group; preferably, the cyclic group is selected from pyrrolidinyl, pyrazolinyl, pyrazolidinyl, imidazolinyl, imidazolidinyl, piperidinyl, piperazinyl, [1,3]dioxolane, oxazolidinyl, isoxazolidinyl, morpholinyl, thiazolidinyl, isothiazolidinyl, quinoxalinyl, pyridazinonyl, tetrahydrofuryl and decalin; preferably, the acyclic group is selected from serinol backbone or diethanolamine backbone. The double-stranded RNA (dsRNA) agent described herein may optionally be conjugated to one or more ligands. The ligand can be attached to the sense strand, antisense strand or both strands, at the 3′-end, 5′-end or both ends. For instance, the ligand may be conjugated to the sense strand, in particular, the 3′-end of the sense strand.

[0222] Non-limiting examples of ALOX15 siRNA sequences directed against human ALOX15 mRNA useful in the present methods include those described in Table 5A and SEQ ID NOS: 1-5349, 5366-5971, 6000-6038, 6050-6074. The sequences are listed in the 5′-3′ orientation. Sequence ID numbers are indicated prior to each sequence. Odd numbered sequences in each line are the sense, or passenger, strand. Even numbered sequences in each strand are the antisense, or guide, strand. Each sense and antisense strand can be annealed to produce the siRNA. In embodiments, at least the final two 3′ nucleotides in each strand are substituted with different nucleotides. In embodiments, one or more nucleotides in each sequence is modified.

[0223] Ligands

[0224] A wide variety of entities can be coupled to the oligonucleotides described herein. In some embodiments, the moieties are ligands, which are coupled, preferably covalently, either directly or indirectly via an intervening tether.

[0225] In preferred embodiments, a ligand alters the distribution, targeting or lifetime of the molecule into which it is incorporated. In preferred embodiments a ligand provides an enhanced affinity for a selected target, e.g., molecule, cell or cell type, compartment, receptor e.g., a cellular or organ compartment, tissue, organ or region of the body, as, e.g., compared to a species absent such a ligand. Ligands providing enhanced affinity for a selected target are also termed targeting ligands.

[0226] Some ligands can have endosomolytic properties. The endosomolytic ligands promote the lysis of the endosome and/or transport of the composition described herein, or its components, from the endosome to the cytoplasm of the cell. The endosomolytic ligand may be a polyanionic peptide or peptidomimetic which shows pH-dependent membrane activity and fusogenicity. In some embodiments, the endosomolytic ligand assumes its active conformation at endosomal pH. The “active” conformation is that conformation in which the endosomolytic ligand promotes lysis of the endosome and/or transport of the composition described herein, or its components, from the endosome to the cytoplasm of the cell. Exemplary endosomolytic ligands include the GALA peptide, the EALA peptide, and their derivatives. In some embodiments, the endosomolytic component may contain a chemical group (e.g., an amino acid) which will undergo a change in charge or protonation in response to a change in pH. The endosomolytic component may be linear or branched. Ligands can improve transport, hybridization, and specificity properties and may also improve nuclease resistance of the resultant natural or modified oligoribonucleotide, or a polymeric molecule comprising any combination of monomers described herein and/or natural or modified ribonucleotides.

[0227] Ligands in general can include therapeutic modifiers, e.g., for enhancing uptake; diagnostic compounds or reporter groups e.g., for monitoring distribution; cross-linking agents; and nuclease-resistance conferring moieties. General examples include lipids, steroids, vitamins, sugars, proteins, peptides, polyamines, and peptide mimics.

[0228] Ligands can include a naturally occurring substance, such as a protein (e.g., human serum albumin (HSA), low-density lipoprotein (LDL), high-density lipoprotein (HDL), or globulin); a carbohydrate (e.g., a dextran, pullulan, chitin, chitosan, inulin, cyclodextrin or hyaluronic acid); or a lipid. The ligand may also be a recombinant or synthetic molecule, such as a synthetic polymer, e.g., a synthetic polyamino acid, an oligonucleotide (e.g. an aptamer). Examples of polyamino acids include polyamino acid is a polylysine (PLL), poly L-aspartic acid, poly L-glutamic acid, styrene-maleic acid anhydride copolymer, poly(L-lactide-co-glycolide) copolymer, divinyl ether-maleic anhydride copolymer, N-(2-hydroxypropyl)methacrylamide copolymer (HMPA), polyethylene glycol (PEG), polyvinyl alcohol (PVA), polyurethane, poly(2-ethylacryllic acid), N-isopropylacrylamide polymers, or polyphosphazine. Example of polyamines include: polyethylenimine, polylysine (PLL), spermine, spermidine, polyamine, pseudopeptide-polyamine, peptidomimetic polyamine, dendrimer polyamine, arginine, amidine, protamine, cationic lipid, cationic porphyrin, quaternary salt of a polyamine, or an alpha helical peptide.

[0229] Ligands can also include targeting groups, e.g., a cell or tissue targeting agent, e.g., a lectin, glycoprotein, lipid or protein, e.g., an antibody, that binds to a specified cell type such as a kidney cell. A targeting group can be a thyrotropin, melanotropin, lectin, glycoprotein, surfactant protein A, Mucin carbohydrate, multivalent lactose, multivalent galactose, N-acetyl-galactosamine, N-acetyl-glucosamine multivalent mannose, multivalent fucose, glycosylated polyaminoacids, multivalent galactose, transferrin, bisphosphonate, polyglutamate, polyaspartate, a lipid, cholesterol, a steroid, bile acid, folate, vitamin B12, biotin, an RGD peptide, an RGD peptide mimetic or an aptamer. FIG. 7 shows some examples of targeting ligands and their associated receptors.

[0230] Other examples of ligands include dyes, intercalating agents (e.g. acridines), cross-linkers (e.g. psoralene, mitomycin C), porphyrins (TPPC4, texaphyrin, Sapphyrin), polycyclic aromatic hydrocarbons (e.g., phenazine, dihydrophenazine), artificial endonucleases or a chelator (e.g. EDTA), lipophilic molecules, e.g., cholesterol, cholic acid, adamantane acetic acid, 1-pyrene butyric acid, dihydrotestosterone, 1,3-Bis-O(hexadecyl)glycerol, geranyloxyhexyl group, hexadecylglycerol, borneol, menthol, 1,3-propanediol, heptadecyl group, palmitic acid, myristic acid,O3-(oleoyl)lithocholic acid, O3-(oleoyl)cholenic acid, dimethoxytrityl, or phenoxazine) and peptide conjugates (e.g., antennapedia peptide, Tat peptide), alkylating agents, phosphate, amino, mercapto, PEG (e.g., PEG-40K), MPEG, [MPEG]2, polyamino, alkyl, substituted alkyl, radiolabeled markers, enzymes, haptens (e.g. biotin), transport/absorption facilitators (e.g., aspirin, vitamin E, folic acid), synthetic ribonucleases (e.g., imidazole, bisimidazole, histamine, imidazole clusters, acridine-imidazole conjugates, Eu3+ complexes of tetraazamacrocycles), dinitrophenyl, HRP, or AP.

[0231] Ligands can be proteins, e.g., glycoproteins, or peptides, e.g., molecules having a specific affinity for a co-ligand, or antibodies e.g., an antibody, that binds to a specified cell type such as a cancer cell, endothelial cell, or bone cell. Ligands may also include hormones and hormone receptors. They can also include non-peptidic species, such as lipids, lectins, carbohydrates, vitamins, cofactors, multivalent lactose, multivalent galactose, N-acetyl-galactosamine, N-acetyl-gulucosamine multivalent mannose, multivalent fucose, or aptamers. The ligand can be, for example, a lipopolysaccharide, an activator of p38 MAP kinase, or an activator of NF-KB.

[0232] The ligand can be a substance, e.g., a drug, which can increase the uptake of the iRNA agent into the cell, for example, by disrupting the cell's cytoskeleton, e.g., by disrupting the cell's microtubules, microfilaments, and/or intermediate filaments. The drug can be, for example, taxon, vincristine, vinblastine, cytochalasin, nocodazole, japlakinolide, latrunculin A, phalloidin, swinholide A, indanocine, or myoservin.

[0233] The ligand can increase the uptake of the oligonucleotide into the cell by activating an inflammatory response, for example. Exemplary ligands that would have such an effect include tumor necrosis factor alpha (TNF alpha), interleukin-1 beta, or gamma interferon.

[0234] In another aspect, the ligand is a moiety, e.g., a vitamin, which is taken up by a target cell, e.g., a proliferating cell. These are particularly useful for treating disorders characterized by unwanted cell proliferation, e.g., of the malignant or non-malignant type, e.g., cancer cells. Exemplary vitamins include vitamin A, E, and K. Other exemplary vitamins include B vitamins, e.g., folic acid, B12, riboflavin, biotin, pyridoxal or other vitamins or nutrients taken up by cancer cells. Also included are HAS, low density lipoprotein (LDL) and high-density lipoprotein (HDL). In another aspect, the ligand is a cell-permeation agent, preferably a helical cell-permeation agent. Preferably, the agent is amphipathic. An exemplary agent is a peptide such as tat or antennopedia. If the agent is a peptide, it can be modified, including a peptidylmimetic, invertomers, non-peptide or pseudo-peptide linkages, and use of D-amino acids. The helical agent is preferably an alpha-helical agent, which preferably has a lipophilic and a lipophobic phase.

[0235] The ligand can be a peptide or peptidomimetic. A peptidomimetic (also referred to herein as an oligopeptidomimetic) is a molecule capable of folding into a defined three-dimensional structure similar to a natural peptide. The peptide or peptidomimetic moiety can be about 5-50 amino acids long, e.g., about 5, 10, 15, 20, 25, 30, 35, 40, 45, or 50 amino acids long. A peptide or peptidomimetic can be, for example, a cell permeation peptide, cationic peptide, amphipathic peptide, or hydrophobic peptide (e.g., consisting primarily of Tyr, Trp or Phe). The peptide moiety can be a dendrimer peptide, constrained peptide or crosslinked peptide. In another alternative, the peptide moiety can include a hydrophobic membrane translocation sequence (MTS). An exemplary hydrophobic MTS-containing peptide is RFGF derived from human fibroblast growth factor 4 and having the amino acid sequence AAVALLPAVLLALLAP (SEQ ID NO: 5350). An RFGF analogue (e.g., amino acid sequence AALLPVLLAAP (SEQ ID NO: 5351)) containing a hydrophobic MTS can also be a targeting moiety. The peptide moiety can be a “delivery” peptide, which can carry large polar molecules including peptides, oligonucleotides, and protein across cell membranes. For example, sequences from the HIV Tat protein (GRKKRRQRRRPPQ (SEQ ID NO: 5352)) and the Drosophila Antennapedia protein (RQIKIWFQNRRMKWK (SEQ ID NO: 5353)) have been found to be capable of functioning as delivery peptides. A peptide or peptidomimetic can be encoded by a random sequence of DNA, such as a peptide identified from a phage-display library, or one-bead-one-compound (OBOC) combinatorial library. Preferably the peptide or peptidomimetic tethered to an iRNA agent via an incorporated monomer unit is a cell targeting peptide such as an arginine-glycine-aspartic acid (RGD)-peptide, or RGD mimic. A peptide moiety can range in length from about 5 amino acids to about 40 amino acids. The peptide moieties can have a structural modification, such as to increase stability or direct conformational properties. Any of the structural modifications described below can be utilized. An RGD peptide moiety can be used to target a tumor cell, such as an endothelial tumor cell or a breast cancer tumor cell. An RGD peptide can facilitate targeting of an iRNA agent to tumors of a variety of other tissues, including the lung, kidney, spleen, or liver. Preferably, the RGD peptide will facilitate targeting of an iRNA agent to the kidney. The RGD peptide can be linear or cyclic, and can be modified, e.g., glycosylated or methylated to facilitate targeting to specific tissues. For example, a glycosylated RGD peptide can deliver an iRNA agent to a tumor cell expressing yB3. Peptides that target markers enriched in proliferating cells can be used. E.g., RGD containing peptides and peptidomimetics can target cancer cells, in particular cells that exhibit an integrin. Thus, one could use RGD peptides, cyclic peptides containing RGD, RGD peptides that include D-amino acids, as well as synthetic RGD mimics. In addition to RGD, one can use other moieties that target the integrin ligand. Generally, such ligands can be used to control proliferating cells and angiogenesis. Preferred conjugates of this type ligands that target PECAM-1, VEGF, or other cancer genes, e.g., a cancer gene described herein.

[0236] A “cell permeation peptide” is capable of permeating a cell, e.g., a microbial cell, such as a bacterial or fungal cell, or a mammalian cell, such as a human cell. A microbial cell-permeating peptide can be, for example, an a-helical linear peptide (e.g., LL-37 or Ceropin PI), a disulfide bond-containing peptide (e.g., a-defensin, β-defensin or bactenecin), or a peptide containing only one or two dominating amino acids (e.g., PR-39 or indolicidin). A cell permeation peptide can also include a nuclear localization signal (NLS). For example, a cell permeation peptide can be a bipartite amphipathic peptide, such as MPG, which is derived from the fusion peptide domain of HIV-1 gp41 and the NLS of SV40 large T antigen.

[0237] In some embodiments, a targeting peptide can be an amphipathic alpha-helical peptide. Exemplary amphipathic α-helical peptides include, but are not limited to, cecropins, lycotoxins, paradaxins, buforin, CPF, bombinin-like peptide (BLP), cathelicidins, ceratotoxins, S. clava peptides, hagfish intestinal antimicrobial peptides (HFIAPs), magainines, brevinins-2, dermaseptins, melittins, pleurocidin, H2A peptides, Xenopus peptides, esculentinis-1, and caerins. A number of factors will preferably be considered to maintain the integrity of helix stability. For example, a maximum number of helix stabilization residues will be utilized (e.g., leu, ala, or lys), and a minimum number helix destabilization residues will be utilized (e.g., proline, or cyclic monomeric units. The capping residue will be considered (for example Gly is an exemplary N-capping residue and/or C-terminal amidation can be used to provide an extra H-bond to stabilize the helix. Formation of salt bridges between residues with opposite charges, separated by i±3, or i±4 positions can provide stability. For example, cationic residues such as lysine, arginine, homo-arginine, ornithine or histidine can form salt bridges with the anionic residues glutamate or aspartate.

[0238] Peptide and peptidomimetic ligands include those having naturally occurring or modified peptides, e.g., D or L peptides; α, β, or γ peptides; N-methyl peptides; azapeptides; peptides having one or more amide, i.e., peptide, linkages replaced with one or more urea, thiourea, carbamate, or sulfonyl urea linkages; or cyclic peptides.

[0239] The targeting ligand can be any ligand that is capable of targeting a specific receptor. Examples are: folate, GalNAc, galactose, mannose, mannose-6P, clusters of sugars such as GalNAc cluster, mannose cluster, galactose cluster, or an apatamer. A cluster is a combination of two or more sugar units. The targeting ligands also include integrin receptor ligands, Chemokine receptor ligands, transferrin, biotin, serotonin receptor ligands, PSMA, endothelin, GCPII, somatostatin, LDL and HDL ligands. The ligands can also be based on nucleic acid, e.g., an aptamer. The aptamer can be unmodified or have any combination of modifications disclosed herein.

[0240] Endosomal release agents include imidazoles, poly or oligoimidazoles, PEIs, peptides, fusogenic peptides, polycaboxylates, polyacations, masked oligo or poly cations or anions, acetals, polyacetals, ketals/polyketyals, orthoesters, polymers with masked or unmasked cationic or anionic charges, dendrimers with masked or unmasked cationic or anionic charges.

[0241] PK modulator stands for pharmacokinetic modulator. PK modulator include lipophiles, bile acids, steroids, phospholipid analogues, peptides, protein binding agents, PEG, vitamins etc. Exemplary PK modulator include, but are not limited to, cholesterol, fatty acids, cholic acid, lithocholic acid, dialkylglycerides, diacylglyceride, phospholipids, sphingo lipids, naproxen, ibuprofen, vitamin E, biotin etc. Oligonucleotides that comprise a number of phosphorothioate linkages are also known to bind to serum protein, thus short oligonucleotides, e.g. oligonucleotides of about 5 bases, 10 bases, 15 bases or 20 bases, comprising multiple of phosphorothioate linkages in the backbone are also amenable as ligands (e.g. as PK modulating ligands).

[0242] In addition, aptamers that bind serum components (e.g. serum proteins) are also amenable as PK modulating ligands.

[0243] Other ligand conjugates amenable are described in U.S. patent application Ser. No. 10/916,185, filed Aug. 10, 2004; U.S. Ser. No. 10/946,873, filed Sep. 21, 2004; U.S. Ser. No. 10/833,934, filed Aug. 3, 2007; U.S. Ser. No. 11/115,989 filed Apr. 27, 2005 and U.S. Ser. No. 11/944,227 filed Nov. 21, 2007.

[0244] When two or more ligands are present, the ligands can all have same properties, all have different properties or some ligands have the same properties while others have different properties. For example, a ligand can have targeting properties, have endosomolytic activity or have PK modulating properties. In a preferred embodiment, all the ligands have different properties.

[0245] Ligands can be coupled to the oligonucleotides at various places, for example, 3′-end, 5′-end, and/or at an internal position. In preferred embodiments, the ligand is attached to the oligonucleotides via an intervening tether, e.g. a carrier described herein. The ligand or tethered ligand may be present on a monomer when said monomer is incorporated into the growing strand. In some embodiments, the ligand may be incorporated via coupling to a “precursor” monomer after said “precursor” monomer has been incorporated into the growing strand. For example, a monomer having, e.g., an amino-terminated tether (i.e., having no associated ligand), e.g., TAP-(CH2)nNH2 may be incorporated into a growing oligonucleotide strand. In a subsequent operation, i.e., after incorporation of the precursor monomer into the strand, a ligand having an electrophilic group, e.g., a pentafluorophenyl ester or aldehyde group, can subsequently be attached to the precursor monomer by coupling the electrophilic group of the ligand with the terminal nucleophilic group of the precursor monomer's tether. In another example, a monomer having a chemical group suitable for taking part in Click Chemistry reaction may be incorporated e.g., an azide or alkyne terminated tether/linker. In a subsequent operation, i.e., after incorporation of the precursor monomer into the strand, a ligand having complementary chemical group, e.g. an alkyne or azide can be attached to the precursor monomer by coupling the alkyne and the azide together.

[0246] For double-stranded oligonucleotides, ligands can be attached to one or both strands. In some embodiments, a double-stranded iRNA agent contains a ligand conjugated to the sense strand. In other embodiments, a double-stranded iRNA agent contains a ligand conjugated to the antisense strand.

[0247] In some embodiments, ligand can be conjugated to nucleobases, sugar moieties, or internucleosidic linkages of nucleic acid molecules. Conjugation to purine nucleobases or derivatives thereof can occur at any position including, endocyclic and exocyclic atoms. In some embodiments, the 2-, 6-, 7-, or 8-positions of a purine nucleobase are attached to a conjugate moiety. Conjugation to pyrimidine nucleobases or derivatives thereof can also occur at any position. In some embodiments, the 2-, 5-, and 6-positions of a pyrimidine nucleobase can be substituted with a conjugate moiety. Conjugation to sugar moieties of nucleosides can occur at any carbon atom. Example carbon atoms of a sugar moiety that can be attached to a conjugate moiety include the 2′, 3′, and 5′ carbon atoms. The F position can also be attached to a conjugate moiety, such as in an abasic residue. Internucleosidic linkages can also bear conjugate moieties. For phosphorus-containing linkages (e.g., phosphodiester, phosphorothioate, phosphorodithioate, phosphoroamidate, and the like), the conjugate moiety can be attached directly to the phosphorus atom or to an O, N, or S atom bound to the phosphorus atom. For amine- or amide-containing internucleosidic linkages (e.g., PNA), the conjugate moiety can be attached to the nitrogen atom of the amine or amide or to an adjacent carbon atom.

[0248] Any suitable ligand in the field of RNA interference may be used, although the ligand is typically a carbohydrate e.g. monosaccharide (such as GalNAc), disaccharide, trisaccharide, tetrasaccharide, polysaccharide. Linkers that conjugate the ligand to the nucleic acid include those discussed above. For example, the ligand can be one or more GalNAc (N-acetylglucosamine) derivatives attached through a bivalent or trivalent branched linker.

[0249] As used herein, the terms “dsRNA”, “siRNA”, and “iRNA agent” are used interchangeably to agents that can mediate silencing of a target RNA, e.g., mRNA, e.g., a transcript of a gene that encodes a protein. For convenience, such mRNA is also referred to herein as mRNA to be silenced. Such a gene is also referred to as a target gene. In general, the RNA to be silenced is an endogenous gene or a pathogen gene. In addition, RNAs other than mRNA, e.g., tRNAs, and viral RNAs, can also be targeted.

[0250] As used herein, the phrase “mediates RNAi” refers to the ability to silence, in a sequence specific manner, a target RNA. While not wishing to be bound by theory, it is believed that silencing uses the RNAi machinery or process and a guide RNA, e.g., an siRNA agent of 21 to 23 nucleotides.

[0251] As used herein, “specifically hybridizable” and “complementary” are terms which are used to indicate a sufficient degree of complementarity such that stable and specific binding occurs between a compound described herein and a target RNA molecule.

[0252] Specific binding requires a sufficient degree of complementarity to avoid non-specific binding of the oligomeric compound to non-target sequences under conditions in which specific binding is desired, i.e., under physiological conditions in the case of assays or therapeutic treatment, or in the case of in vitro assays, under conditions in which the assays are performed. The non-target sequences typically differ by at least 5 nucleotides.

[0253] In some embodiments, a dsRNA agent described herein is “sufficiently complementary” to a target RNA, e.g., a target mRNA, such that the dsRNA agent silences production of protein encoded by the target mRNA. In some embodiments, the dsRNA agent described herein is “exactly complementary” to a target RNA, e.g., the target RNA and the dsRNA duplex agent anneal, for example to form a hybrid made exclusively of Watson-Crick base pairs in the region of exact complementarity. A “sufficiently complementary” target RNA can include an internal region (e.g., of at least 10 nucleotides) that is exactly complementary to a target RNA. Moreover, in some embodiments, the dsRNA agent described herein specifically discriminates a single-nucleotide difference. In this case, the dsRNA agent only mediates RNAi if exact complementary is found in the region (e.g., within 7 nucleotides of) the single-nucleotide difference. As used herein, the term “oligonucleotide” refers to a nucleic acid molecule (RNA or DNA) for example of length less than 100, 200, 300, or 400 nucleotides.

[0254] The term “halo” refers to any radical of fluorine, chlorine, bromine or iodine. The term “alkyl” refers to saturated and unsaturated non-aromatic hydrocarbon chains that may be a straight chain or branched chain, containing the indicated number of carbon atoms (these include without limitation propyl, allyl, or propargyl), which may be optionally inserted with N, O, or S. For example, Ci-Cio indicates that the group may have from 1 to 10 (inclusive) carbon atoms in it. The term “alkoxy” refers to an —O-alkyl radical. The term “alkylene” refers to a divalent alkyl (i.e., —R—). The term “alkylenedioxo” refers to a divalent species of the structure —O—R—O—, in which R represents an alkylene. The term “aminoalkyl” refers to an alkyl substituted with an amino. The term “mercapto” refers to an —SH radical. The term “thioalkoxy” refers to an —S-alkyl radical.

[0255] The term “aryl” refers to a 6-carbon monocyclic or 10-carbon bicyclic aromatic ring system wherein 0, 1, 2, 3, or 4 atoms of each ring may be substituted by a substituent. Examples of aryl groups include phenyl, naphthyl and the like. The term “arylalkyl” or the term “aralkyl” refers to alkyl substituted with an aryl. The term “arylalkoxy” refers to an alkoxy substituted with aryl.

[0256] The term “cycloalkyl” as employed herein includes saturated and partially unsaturated cyclic hydrocarbon groups having 3 to 12 carbons, for example, 3 to 8 carbons, and, for example, 3 to 6 carbons, wherein the cycloalkyl group additionally may be optionally substituted. Cycloalkyl groups include, without limitation, cyclopropyl, cyclobutyl, cyclopentyl, cyclopentenyl, cyclohexyl, cyclohexenyl, cycloheptyl, and cyclooctyl.

[0257] The term “heteroaryl” refers to an aromatic 5-8 membered monocyclic, 8-12 membered bicyclic, or 1 1-14 membered tricyclic ring system having 1-3 heteroatoms if monocyclic, 1-6 heteroatoms if bicyclic, or 1-9 heteroatoms if tricyclic, said heteroatoms selected from O, N, or S (e.g., carbon atoms and 1-3, 1-6, or 1-9 heteroatoms of N, O, or S if monocyclic, bicyclic, or tricyclic, respectively), wherein 0, 1, 2, 3, or 4 atoms of each ring may be substituted by a substituent. Examples of heteroaryl groups include pyridyl, furyl or furanyl, imidazolyl, benzimidazolyl, pyrimidinyl, thiophenyl or thienyl, quinolinyl, indolyl, thiazolyl, and the like. The term “heteroarylalkyl” or the term “heteroaralkyl” refers to an alkyl substituted with a heteroaryl. The term “heteroarylalkoxy” refers to an alkoxy substituted with heteroaryl.

[0258] The term “heterocyclyl” refers to a nonaromatic 5-8 membered monocyclic, 8-12 membered bicyclic, or 11-14 membered tricyclic ring system having 1-3 heteroatoms if monocyclic, 1-6 heteroatoms if bicyclic, or 1-9 heteroatoms if tricyclic, said heteroatoms selected from O, N, or S (e.g., carbon atoms and 1-3, 1-6, or 1-9 heteroatoms of N, O, or S if monocyclic, bicyclic, or tricyclic, respectively), wherein 0, 1, 2 or 3 atoms of each ring may be substituted by a substituent. Examples of heterocyclyl groups include trizolyl, tetrazolyl, piperazinyl, pyrrolidinyl, dioxanyl, morpholinyl, tetrahydrofuranyl, and the like.

[0259] The term “oxo” refers to an oxygen atom, which forms a carbonyl when attached to carbon, an N-oxide when attached to nitrogen, and a sulfoxide or sulfone when attached to sulfur.

[0260] The term “acyl” refers to an alkylcarbonyl, cycloalkylcarbonyl, arylcarbonyl, heterocyclylcarbonyl, or heteroarylcarbonyl substituent, any of which may be further substituted by substituents.

[0261] The term “substituted” refers to the replacement of one or more hydrogen radicals in a given structure with the radical of a specified substituent including, but not limited to: halo, alkyl, alkenyl, alkynyl, aryl, heterocyclyl, thiol, alkylthio, arylthio, alkylthioalkyl, arylthioalkyl, alkylsulfonyl, alkylsulfonylalkyl, arylsulfonylalkyl, alkoxy, aryloxy, aralkoxy, aminocarbonyl, alkylamino carbonyl, arylaminocarbonyl, alkoxycarbonyl, aryloxycarbonyl, haloalkyl, amino, trifluoromethyl, cyano, nitro, alkylamino, arylamino, alkylaminoalkyl, arylaminoalkyl, aminoalkylamino, hydroxy, alkoxyalkyl, carboxyalkyl, alkoxycarbonylalkyl, aminocarbonylalkyl, acyl, aralkoxycarbonyl, carboxylic acid, sulfonic acid, sulfonyl, phosphonic acid, aryl, heteroaryl, heterocyclic, and aliphatic. It is understood that the substituent can be further substituted.

[0262] Cleavable Linking Groups

[0263] A cleavable linking group is one which is sufficiently stable outside the cell, but which upon entry into a target cell is cleaved to release the two parts the linker is holding together. In a preferred embodiment, the cleavable linking group is cleaved at least 10 times or more, preferably at least 100 times faster in the target cell or under a first reference condition (which can, e.g., be selected to mimic or represent intracellular conditions) than in the blood of a subject, or under a second reference condition (which can, e.g., be selected to mimic or represent conditions found in the blood or serum).

[0264] Cleavable linking groups are susceptible to cleavage agents, e.g., pH, redox potential or the presence of degradative molecules. Generally, cleavage agents are more prevalent or found at higher levels or activities inside cells than in serum or blood.

[0265] Examples of such degradative agents include: redox agents which are selected for particular substrates or which have no substrate specificity, including, e.g., oxidative or reductive enzymes or reductive agents such as mercaptans, present in cells, that can degrade a redox cleavable linking group by reduction; esterases; endosomes or agents that can create an acidic environment, e.g., those that result in a pH of five or lower; enzymes that can hydrolyze or degrade an acid cleavable linking group by acting as a general acid, peptidases (which can be substrate specific), and phosphatases.

[0266] A cleavable linkage group, such as a disulfide bond can be susceptible to pH. The pH of human serum is 7.4, while the average intracellular pH is slightly lower, ranging from about 7.1-7.3. Endosomes have a more acidic pH, in the range of 5.5-6.0, and lysosomes have an even more acidic pH at around 5.0. Some linkers will have a cleavable linking group that is cleaved at a preferred pH, thereby releasing the cationic lipid from the ligand inside the cell, or into the desired compartment of the cell.

[0267] A linker can include a cleavable linking group that is cleavable by a particular enzyme. The type of cleavable linking group incorporated into a linker can depend on the cell to be targeted. For example, liver targeting ligands can be linked to the cationic lipids through a linker that includes an ester group. Liver cells are rich in esterases, and therefore the linker will be cleaved more efficiently in liver cells than in cell types that are not esterase-rich. Other cell-types rich in esterases include cells of the lung, renal cortex, and testis.

[0268] Linkers that contain peptide bonds can be used when targeting cell types rich in peptidases, such as liver cells and synoviocytes. In general, the suitability of a candidate cleavable linking group can be evaluated by testing the ability of a degradative agent (or condition) to cleave the candidate linking group. It will also be desirable to also test the candidate cleavable linking group for the ability to resist cleavage in the blood or when in contact with other non-target tissue. Thus one can determine the relative susceptibility to cleavage between a first and a second condition, where the first is selected to be indicative of cleavage in a target cell and the second is selected to be indicative of cleavage in other tissues or biological fluids, e.g., blood or serum. The evaluations can be carried out in cell free systems, in cells, in cell culture, in organ or tissue culture, or in whole animals. It may be useful to make initial evaluations in cell-free or culture conditions and to confirm by further evaluations in whole animals. In preferred embodiments, useful candidate compounds are cleaved at least 2, 4, 10 or 100 times faster in the cell (or under in vitro conditions selected to mimic intracellular conditions) as compared to blood or serum (or under in vitro conditions selected to mimic extracellular conditions).

[0269] Redox Cleavable Linking Groups

[0270] One class of cleavable linking groups are redox cleavable linking groups that are cleaved upon reduction or oxidation. An example of reductively cleavable linking group is a disulphide linking group (—S—S—). To determine if a candidate cleavable linking group is a suitable “reductively cleavable linking group,” or for example is suitable for use with a particular iRNA moiety and particular targeting agent one can look to methods described herein. For example, a candidate can be evaluated by incubation with dithiothreitol (DTT), or other reducing agent using reagents know in the art, which mimic the rate of cleavage which would be observed in a cell, e.g., a target cell. The candidates can also be evaluated under conditions which are selected to mimic blood or serum conditions. In a preferred embodiment, candidate compounds are cleaved by at most 10% in the blood. In preferred embodiments, useful candidate compounds are degraded at least 2, 4, 10 or 100 times faster in the cell (or under in vitro conditions selected to mimic intracellular conditions) as compared to blood (or under in vitro conditions selected to mimic extracellular conditions). The rate of cleavage of candidate compounds can be determined using standard enzyme kinetics assays under conditions chosen to mimic intracellular media and compared to conditions chosen to mimic extracellular media.

[0271] Phosphate-Based Cleavable Linking Groups

[0272] Phosphate-based cleavable linking groups are cleaved by agents that degrade or hydrolyze the phosphate group. An example of an agent that cleaves phosphate groups in cells are enzymes such as phosphatases in cells. Examples of phosphate-based linking groups are —O—P(O)(ORk)-O—, —O—P(S)(ORk)-O—, —O—P(S)(SRk)-O—, —S—P(O)(ORk)-O—, —O—P(O)(ORk)-S—, —S—P(O)(ORk)-S—, —O—P(S)(ORk)-S—, —S—P(S)(ORk)-O—, —O—P(O)(Rk)-O—, —O—P(S)(Rk)-O—, —S—P(O)(Rk)-O—, —S—P(S)(Rk)-O—, —S—P(O)(Rk)-S—, —O—P(S)(Rk)-S—. Preferred embodiments are —O—P(O)(OH)—O—, —O—P(S)(OH)—O—, —O—P(S)(SH)—O—, —S—P(O)(OH)—O—, —O—P(O)(OH)—S—, —S—P(O)(OH)—S—, —O—P(S)(OH)—S—, —S—P(S)(OH)—O—, —O—P(O)(H)—O—, —O—P(S)(H)—O—, —S—P(O)(H)—O—, —S—P(S)(H)—O—, —S—P(O)(H)—S—, —O—P(S)(H)—S—. A preferred embodiment is —O—P(O)(OH)—O—. These candidates can be evaluated using methods analogous to those described above.

[0273] Acid Cleavable Linking Groups

[0274] Acid cleavable linking groups are linking groups that are cleaved under acidic conditions. In preferred embodiments acid cleavable linking groups are cleaved in an acidic environment with a pH of about 6.5 or lower (e.g., about 6.0, 5.5, 5.0, or lower), or by agents such as enzymes that can act as a general acid. In a cell, specific low pH organelles, such as endosomes and lysosomes can provide a cleaving environment for acid cleavable linking groups. Examples of acid cleavable linking groups include but are not limited to hydrazones, esters, and esters of amino acids. Acid cleavable groups can have the general formula —C═NN—C(O)O, or —OC(O). A preferred embodiment is when the carbon attached to the oxygen of the ester (the alkoxy group) is an aryl group, substituted alkyl group, or tertiary alkyl group such as dimethyl pentyl or t-butyl. These candidates can be evaluated using methods analogous to those described above.

[0275] Ester-Based Linking Groups

[0276] Ester-based cleavable linking groups are cleaved by enzymes such as esterases and amidases in cells. Examples of ester-based cleavable linking groups include but are not limited to esters of alkylene, alkenylene and alkynylene groups. Ester cleavable linking groups have the general formula —C(O)O—, or —OC(O)—. These candidates can be evaluated using methods analogous to those described above.

[0277] Peptide-Based Cleaving Groups

[0278] Peptide-based cleavable linking groups are cleaved by enzymes such as peptidases and proteases in cells. Peptide-based cleavable linking groups are peptide bonds formed between amino acids to yield oligopeptides (e.g., dipeptides, tripeptides etc.) and polypeptides. Peptide-based cleavable groups do not include the amide group (—C(O)NH—). The amide group can be formed between any alkylene, alkenylene or alkynelene. A peptide bond is a special type of amide bond formed between amino acids to yield peptides and proteins. The peptide based cleavage group is generally limited to the peptide bond (i.e., the amide bond) formed between amino acids yielding peptides and proteins and does not include the entire amide functional group. Peptide-based cleavable linking groups have the general formula —NHCHRAC(O)NHCHRBC(O)—, where RA and RB are the R groups of the two adjacent amino acids. These candidates can be evaluated using methods analogous to those described above. As used herein, “carbohydrate” refers to a compound which is either a carbohydrate per se made up of one or more monosaccharide units having at least 6 carbon atoms (which may be linear, branched or cyclic) with an oxygen, nitrogen or sulfur atom bonded to each carbon atom; or a compound having as a part thereof a carbohydrate moiety made up of one or more monosaccharide units each having at least six carbon atoms (which may be linear, branched or cyclic), with an oxygen, nitrogen or sulfur atom bonded to each carbon atom. Representative carbohydrates include the sugars (mono-, di-, tri- and oligosaccharides containing from about 4-9 monosaccharide units), and polysaccharides such as starches, glycogen, cellulose and polysaccharide gums. Specific monosaccharides include C5 and above (preferably C5-C8) sugars; di- and trisaccharides include sugars having two or three monosaccharide units (preferably C5-C8).

[0279] In still yet another aspect, the modified siRNA described herein is used in methods for silencing expression of a target sequence. In particular, it is an object of the present invention to provide in vitro and in vivo methods for treatment of a disease or disorder in a mammal by downregulating or silencing the transcription and/or translation of a target gene of interest. In some embodiments, described herein are methods for introducing an siRNA that silences expression (e.g., mRNA and/or protein levels) of a target sequence into a cell by contacting the cell with a modified siRNA described herein. In some embodiments, described herein are methods for in vivo delivery of a siRNA that silences expression of a target sequence by administering to a mammal a modified siRNA described herein. Administration of the modified siRNA can be by any route known in the art, such as, e.g., oral, intranasal, intravenous, intraperitoneal, intramuscular, intra-articular, intralesional, intratracheal, subcutaneous, or intradermal.

[0280] In certain embodiments, the modified siRNA further comprises a carrier system, e.g., to deliver the modified siRNA into a cell of a mammal. Non-limiting examples of carrier systems include, but are not limited to, nucleic acid-lipid particles, liposomes, micelles, virosomes, nucleic acid complexes, and mixtures thereof. In some embodiments, the modified siRNA molecule is complexed with a lipid such as a cationic lipid to form a lipoplex. In certain other instances, the modified siRNA molecule is complexed with a polymer such as a cationic polymer (e.g., polyethylenimine (PEI)) to form a polyplex. The modified siRNA molecule may also be complexed with cyclodextrin or a polymer thereof. Preferably, the modified siRNA molecule is encapsulated in a nucleic acid-lipid particle.

[0281] In some embodiments, described herein are methods for delivering dsRNA to a specific target in a subject by nasal administration.

### Additional Embodiments

[0282] In some embodiments, described herein are dsRNA agents capable of inhibiting the expression of a target gene. The dsRNA agent comprises a sense strand and an antisense strand, each strand having 14 to 30 nucleotides. Every nucleotide in the sense strand and antisense strand has been modified. The modifications on sense strand and antisense strand each independently comprises at least two different modifications.

[0283] In some embodiments, described herein are dsRNA agents capable of inhibiting the expression of a target gene. The dsRNA agent comprises a sense strand and an antisense strand, each strand having 14 to 30 nucleotides. The sense strand contains at least one motif of three identical modifications on three consecutive nucleotides, where at least one of the motifs occurs at or near the cleavage site in the antisense strand. The antisense strand contains at least one motif of three identical modifications on three consecutive nucleotides. The modification pattern of the antisense strand is shifted by one or more nucleotides relative to the modification pattern of the sense strand.

[0284] In some embodiments, described herein are dsRNA agents capable of inhibiting the expression of a target gene. The dsRNA agent comprises a sense strand and an antisense strand, each strand having 14 to 30 nucleotides. The sense strand contains at least two motifs of three identical modifications on three consecutive nucleotides, when at least one of the motifs occurs at the cleavage site in the strand and at least one of the motifs occurs at another portion of the strand that is separated from the motif at the cleavage site by at least one nucleotide. The antisense strand contains at least one motif of three identical modifications on three consecutive nucleotides, where at least one of the motifs occurs at or near the cleavage site in the strand and at least one of the motifs occurs at another portion of the strand that is separated from the motif at or near cleavage site by at least one nucleotide.

[0285] In some embodiments, described herein are dsRNA agents capable of inhibiting the expression of a target gene. The dsRNA agent comprises a sense strand and an antisense strand, each strand having 14 to 30 nucleotides. The sense strand contains at least two motifs of three identical modifications on three consecutive nucleotides, where at least one of the motifs occurs at the cleavage site in the strand and at least one of the motifs occurs at another portion of the strand that is separated from the motif at the cleavage site by at least one nucleotide. The antisense strand contains at least one motif of three identical modifications on three consecutive nucleotides, where at least one of the motifs occurs at or near the cleavage site in the strand and at least one of the motifs occurs at another portion of the strand that is separated from the motif at or near cleavage site by at least one nucleotide. The modification in the motif occurring at the cleavage site in the sense strand is different than the modification in the motif occurring at or near the cleavage site in the antisense strand. In some embodiments, described herein are dsRNA agents capable of inhibiting the expression of a target gene. The dsRNA agent comprises a sense strand and an antisense strand, each strand having 12 to 30 nucleotides. The sense strand contains at least one motif of three 2′-F modifications on three consecutive nucleotides, where at least one of the motifs occurs at the cleavage site in the strand. The antisense strand contains at least one motif of three 2′-O-methyl modifications on three consecutive nucleotides.

[0286] The sense strand may further comprises one or more motifs of three identical modifications on three consecutive nucleotides, where the one or more additional motifs occur at another portion of the strand that is separated from the three 2′-F modifications at the cleavage site by at least one nucleotide. The antisense strand may further comprises one or more motifs of three identical modifications on three consecutive nucleotides, where the one or more additional motifs occur at another portion of the strand that is separated from the three 2′-O-methyl modifications by at least one nucleotide. At least one of the nucleotides having a 2′-F modification may form a base pair with one of the nucleotides having a 2′-O-methyl modification.

[0287] In some embodiments, the dsRNA described herein is administered in buffer.

[0288] In some embodiments, siRNA compounds described herein can be formulated for administration to a subject. A formulated siRNA composition can assume a variety of states. In some examples, the composition is at least partially crystalline, uniformly crystalline, and/or anhydrous (e.g., less than 80, 50, 30, 20, or 10% water). In another example, the siRNA is in an aqueous phase, e.g., in a solution that includes water.

[0289] The aqueous phase or the crystalline compositions can, e.g., be incorporated into a delivery vehicle, e.g., a liposome (particularly for the aqueous phase) or a particle (e.g., a microparticle as can be appropriate for a crystalline composition). Generally, the siRNA composition is formulated in a manner that is compatible with the intended method of administration, as described herein. For example, in particular embodiments the composition is prepared by at least one of the following methods: spray drying, lyophilization, vacuum drying, evaporation, fluid bed drying, or a combination of these techniques; or sonication with a lipid, freeze-drying, condensation and other self-assembly.

[0290] A siRNA preparation can be formulated in combination with another agent, e.g., another therapeutic agent or an agent that stabilizes a siRNA, e.g., a protein that complexes with siRNA to form an iRNP. Still other agents include chelators, e.g., EDTA (e.g., to remove divalent cations such as Mg2+), salts, RNAse inhibitors (e.g., a broad specificity RNAse inhibitor such as RNAsin) and so forth.

[0291] In some embodiments, the siRNA preparation includes another siRNA compound, e.g., a second siRNA that can mediate RNAi with respect to a second gene, or with respect to the same gene. Still other preparation can include at least 3, 5, ten, twenty, fifty, or a hundred or more different siRNA species. Such siRNAs can mediate RNAi with respect to a similar number of different genes.

[0292] In some embodiments, the siRNA preparation includes at least a second therapeutic agent (e.g., an agent other than a RNA or a DNA). For example, a siRNA composition for the treatment of a viral disease, e.g., HIV, might include a known antiviral agent (e.g., a protease inhibitor or reverse transcriptase inhibitor). In another example, a siRNA composition for the treatment of a cancer might further comprise a chemotherapeutic agent.

[0293] Regarding the sequence listing in this specification, the last two 3′ bases in each oligonucleotide/siRNA can be substituted with any base (e.g., “NN”). Additionally, a 2′ deoxy can be a substitution at any position. In all of the oligonucleotides listed, any U (Uracil) can be substituted for a T (Thymine) as well as the reverse.

[0294] Further provided herein are the following embodiments: 1. A pharmaceutical composition comprising an siRNA molecule comprising a sense strand and an antisense strand, which targets SEQ ID NO: 5357 and when administered to a patient in an effective amount reduces eosinophil count, wherein the siRNA comprises a modification comprising a modified nucleoside and/or a modified internucleoside linkage; wherein the patient comprises nasal polyposis, chronic sinusitis, allergic rhinitis, or NSAID-exacerbated respiratory disease, or a combination thereof. 2. A pharmaceutical composition comprising an siRNA molecule comprising a sense strand and an antisense strand, which targets SEQ ID NO: 5357 and when administered to a patient in an effective amount reduces eosinophil count, and a pharmaceutically acceptable carrier; wherein the patient comprises nasal polyposis, chronic sinusitis, allergic rhinitis, or NSAID-exacerbated respiratory disease, or a combination thereof. 3. The pharmaceutical composition of embodiment 1 or embodiment 2, wherein the systemic or local eosinophil count is reduced by about 10% or more as compared to the eosinophil count prior to administration. 4. A pharmaceutical composition comprising an siRNA molecule which targets SEQ ID NO: 5357 and when administered in an effective amount to a patient comprising nasal polyps, the nasal polyps are reduced in number and/or size the patient, wherein the siRNA comprises a modification comprising a modified nucleoside and/or a modified internucleoside linkage. 5. A pharmaceutical composition comprising an siRNA molecule which targets SEQ ID NO: 5357 and when administered in an effective amount to a patient comprising nasal polyps, the nasal polyps are reduced in number and/or size in the patient; and a pharmaceutically acceptable carrier. 6. The pharmaceutical composition of embodiment 4 or embodiment 5, wherein the nasal polyps are reduced in number and/or size by about 10% or more by CT scan or endoscopic assessment, as compared to the number and/or size prior to administration. 7. A pharmaceutical composition comprising an siRNA molecule which targets SEQ ID NO: 5357 and when administered to a patient in an effective amount increases nasal inspiratory peak flow in the patient, wherein the siRNA comprises a modification comprising a modified nucleoside and/or a modified internucleoside linkage. 8. A pharmaceutical composition comprising an siRNA molecule which targets SEQ ID NO: 5357 and when administered to a patient in an effective amount increases nasal inspiratory peak flow in the patient, and a pharmaceutically acceptable carrier. 9. The pharmaceutical composition of embodiment 7 or embodiment 8, wherein the nasal inspiratory peak flow is increased by about 10% or more, as compared to prior to administration. 10. A pharmaceutical composition comprising an siRNA molecule which targets SEQ ID NO: 5357 and when administered to a patient in an effective amount reduces airway symptoms in the patient, wherein the patient comprises nasal polyposis, chronic sinusitis, allergic rhinitis, or NSAID-exacerbated respiratory disease, or a combination thereof, and wherein (i) the pharmaceutical composition comprises a pharmaceutically acceptable carrier, and/or (ii) the siRNA comprises a modification comprising a modified nucleoside and/or a modified internucleoside linkage. 11. The pharmaceutical composition of embodiment 10, wherein the airway inflammation symptoms are reduced by about 10% or more on a patient-reported outcome measure, as compared to prior to administration. 12. A pharmaceutical composition comprising an siRNA molecule which targets SEQ ID NO: 5357 and when administered to a patient in an effective amount improves sense of smell in the patient, wherein the patient comprises nasal polyposis, chronic sinusitis, allergic rhinitis, or NSAID-exacerbated respiratory disease, or a combination thereof, and wherein (i) the pharmaceutical composition comprises a pharmaceutically acceptable carrier, and/or (ii) the siRNA comprises a modification comprising a modified nucleoside and/or a modified internucleoside linkage. 13. The pharmaceutical composition of embodiment 12, wherein the sense of smell is improved by about 10% or more on a patient-reported outcome measure, as compared to prior to administration.

[0295] 14. A pharmaceutical composition comprising an siRNA molecule that inhibits the expression of ALOX15, wherein the siRNA comprises a sense strand and an antisense strand, each strand is independently about 14-30 nucleosides in length, and at least one of the sense strand and the antisense strand comprises a nucleoside sequence comprising about 14-30 contiguous nucleosides of SEQ ID NO: 6000 (C AGAGCTGCAG ACCTGGTGTC GAGAGATCAC TGAAATCGGG CTGCAAGGGG CCCAGGACCG AGGGTTTCCT GTCTCTTTAC AGGCTCGGGA CCAGGTTTGC CACTTTGTCA CCATGTGTAT CTTCACCTGC ACCGGCCAAC ACGCCTCTGT); and a pharmaceutically acceptable carrier. 15. A pharmaceutical composition comprising an siRNA molecule that inhibits the expression of ALOX15, wherein the siRNA comprises a sense strand and an antisense strand, each strand is independently about 14-30 nucleosides in length, and at least one of the sense strand and the antisense strand comprises a nucleoside sequence comprising about 14-30 contiguous nucleosides of SEQ ID NO: 6000 (C AGAGCTGCAG ACCTGGTGTC GAGAGATCAC TGAAATCGGG CTGCAAGGGG CCCAGGACCG AGGGTTTCCT GTCTCTTTAC AGGCTCGGGA CCAGGTTTGC CACTTTGTCA CCATGTGTAT CTTCACCTGC ACCGGCCAAC ACGCCTCTGT); wherein the siRNA comprises a modification comprising a modified nucleoside and/or a modified internucleoside linkage. 16. The pharmaceutical composition of embodiment 14 or embodiment 15, wherein the sense strand comprises about 14-30 contiguous nucleosides of SEQ ID NO: 6001 (C AGAGCTGCAG ACCTGGTGTC GAGAGATCAC TGAAATCGGG CTGCAAGGGG) or SEQ ID NO: 6002 (CTTTAC AGGCTCGGGA CCAGGTTTGC CACTTTGTCA CCATGTGTAT CTTCA). 17. A pharmaceutical composition comprising an siRNA molecule that inhibits the expression of ALOX15, wherein the siRNA comprises a sense strand and an antisense strand, each strand is independently about 14-30 nucleosides in length, and at least one of the sense strand and the antisense strand comprises a nucleoside sequence comprising about 14-30 contiguous nucleosides of SEQ ID NO: 6003 (A CCCTCTTCCC ATGTCCCACC CTCCCTAGAG GGGCACCTTT TCATGGTCTC TGCACCCAGT GAACACATTT TACTCTAGAG GCATCACCTG GGACCTTACT); and a pharmaceutically acceptable carrier. 18. A pharmaceutical composition comprising an siRNA molecule that inhibits the expression of ALOX15, wherein the siRNA comprises a sense strand and an antisense strand, each strand is independently about 14-30 nucleosides in length, and at least one of the sense strand and the antisense strand comprises a nucleoside sequence comprising about 14-30 contiguous nucleosides of SEQ ID NO: 6003 (A CCCTCTTCCC ATGTCCCACC CTCCCTAGAG GGGCACCTTT TCATGGTCTC TGCACCCAGT GAACACATTT TACTCTAGAG GCATCACCTG GGACCTTACT); wherein the siRNA comprises a modification comprising a modified nucleoside and/or a modified internucleoside linkage. 19. The pharmaceutical composition of embodiment 17 or embodiment 18, wherein the sense strand comprises about 14-30 contiguous nucleosides of SEQ ID NO: 6004 (TAGAG GGGCACCTTT TCATGGTCTC TGCACCCAGT GAACACATTT TACTC). 20. A pharmaceutical composition comprising an siRNA molecule that inhibits the expression of ALOX15, wherein the siRNA comprises a sense strand and an antisense strand, each strand is independently about 14-30 nucleosides in length, and at least one of the sense strand and the antisense strand comprises a nucleoside sequence comprising about 14-30 contiguous nucleosides of SEQ ID NO: 6005 (G ACATGGGAAT TTTCGACCAG ATAATGAGCA CTGGTGGGGG AGGCCACGTG CAGCTGCTCA AGCAAGCTGG AGCCTTCCTA ACCTACAGCT CCTTCTGTCC CCCTGATGAC TTGGCCGACC GGGGGCTCCT GGGAGTGAAG TCTTCCTTCT); and a pharmaceutically acceptable carrier. 21. A pharmaceutical composition comprising an siRNA molecule that inhibits the expression of ALOX15, wherein the siRNA comprises a sense strand and an antisense strand, each strand is independently about 14-30 nucleosides in length, and at least one of the sense strand and the antisense strand comprises a nucleoside sequence comprising about 14-30 contiguous nucleosides of SEQ ID NO: 6005 (G ACATGGGAAT TTTCGACCAG ATAATGAGCA CTGGTGGGGG AGGCCACGTG CAGCTGCTCA AGCAAGCTGG AGCCTTCCTA ACCTACAGCT CCTTCTGTCC CCCTGATGAC TTGGCCGACC GGGGGCTCCT GGGAGTGAAG TCTTCCTTCT); wherein the siRNA comprises a modification comprising a modified nucleoside and/or a modified internucleoside linkage. 22. The pharmaceutical composition of embodiment 20 or embodiment 21, wherein the sense strand comprises about 14-30 contiguous nucleosides of SEQ ID NO: 6006 (G CAGCTGCTCA AGCAAGCTGG AGCCTTCCTA ACCTACAGCT CCTTCTGTCC).

[0296] 23. The pharmaceutical composition of any one of embodiments 1, 3, 4, 6, 7, 9, 15, 16, 18, 19, 21, and 22 further comprising a pharmaceutically acceptable carrier. 24. The pharmaceutical composition of any one of embodiments 2, 3, 5, 6, 8, 9, 14, 16, 17, 19, 20, and 22 comprising a modified internucleoside linkage and/or a modified nucleoside. 25. The pharmaceutical composition of any one of embodiments 1, 3, 4, 6, 7, 9, 10, 11, 12, 13, 15, 16, 18, 19, 21, 22, 23, and 24 comprising the modified internucleoside linkage. 26. The pharmaceutical composition of embodiment 24 or embodiments 25, wherein the modified internucleoside linkage comprises alkylphosphonate, phosphorothioate, methylphosphonate, phosphorodithioate, alkylphosphonothioate, phosphoramidate, carbamate, carbonate, phosphate triester, acetamidate, or carboxymethyl ester, or a combination thereof. 27. The pharmaceutical composition of embodiment 26, wherein the modified internucleoside linkage comprises one or more phosphorothioate linkages. 28. The pharmaceutical composition of embodiment 27, wherein the one or more phosphorothioate linkages is about 1, 2, 3, 4, 5, 6, 7, 8, 9, 10, 11, 12, 13, 14, 15, 16, 17, 18, 19, 20, 21, 22, 23, 24, 25, 26, 27, 28, 29, 30, 31, 32, 33, 34, 35, 36, 37, 38, 39, 40, 41, or 42 phosphorothioate linkages.

[0297] 29. The pharmaceutical composition of embodiment 27 or embodiment 28, wherein the sense strand of the siRNA comprises one or more phosphorothioate linkages. 30. The pharmaceutical composition of embodiment 29, wherein the one or more phosphorothioate linkages of the sense strand is about 1, 2, 3, 4, 5, 6, 7, 8, 9, 10, 11, 12, 13, 14, 15, 16, 17, 18, 19, 20, or 21 phosphorothioate linkages. 31. The pharmaceutical composition of embodiment 30, wherein the one or more phosphorothioate linkages of the sense strand is about 1, 2, 3, 4, or 5 phosphorothioate linkages. 32. The pharmaceutical composition of embodiment 31, wherein the one or more phosphorothioate linkages of the sense strand is about 4 phosphorothioate linkages. 33. The pharmaceutical composition of any one of embodiments 29-32, wherein the sense strand comprises a phosphorothioate linkage between the first nucleoside and the second nucleoside of the sense strand, in a 5′ to 3′ direction. 34. The pharmaceutical composition of any one of embodiments 29-33, wherein the sense strand comprises a phosphorothioate linkage between the second nucleoside and the third nucleoside of the sense strand, in a 5′ to 3′ direction. 35. The pharmaceutical composition of any one of embodiments 29-34, wherein the sense strand comprises a phosphorothioate linkage between the nineteenth nucleoside and the twentieth nucleoside of the sense strand, in a 5′ to 3′ direction. 36. The pharmaceutical composition of any one of embodiments 29-35, wherein the sense strand comprises a phosphorothioate linkage between the twentieth nucleoside and the twenty-first nucleoside of the sense strand, in a 5′ to 3′ direction.

[0298] 37. The pharmaceutical composition of any one of embodiments 27-36, wherein the antisense strand of the siRNA comprises one or more phosphorothioate linkages. 38. The pharmaceutical composition of embodiment 37, wherein the one or more phosphorothioate linkages of the antisense strand is about 1, 2, 3, 4, 5, 6, 7, 8, 9, 10, 11, 12, 13, 14, 15, 16, 17, 18, 19, 20, or 21 phosphorothioate linkages. 39. The pharmaceutical composition of embodiment 38, wherein the one or more phosphorothioate linkages of the antisense strand is about 1, 2, 3, 4, or 5 phosphorothioate linkages. 40. The pharmaceutical composition of embodiment 39, wherein the one or more phosphorothioate linkages of the antisense strand is about 4 phosphorothioate linkages. 41. The pharmaceutical composition of any one of embodiments 37-40, wherein the antisense strand comprises a phosphorothioate linkage between the first nucleoside and the second nucleoside of the antisense strand, in a 5′ to 3′ direction. 42. The pharmaceutical composition of any one of embodiments 37-41, wherein the antisense strand comprises a phosphorothioate linkage between the second nucleoside and the third nucleoside of the antisense strand, in a 5′ to 3′ direction. 43. The pharmaceutical composition of any one of embodiments 37-42, wherein the antisense strand comprises a phosphorothioate linkage between the nineteenth nucleoside and the twentieth nucleoside of the sense strand, in a 5′ to 3′ direction. 44. The pharmaceutical composition of any one of embodiments 37-43, wherein the antisense strand comprises a phosphorothioate linkage between the twentieth nucleoside and the twenty-first nucleoside of the sense strand, in a 5′ to 3′ direction.

[0299] 45. The pharmaceutical composition of any one of embodiments 1, 3, 4, 6, 7, 9, 10, 12, 14, 18, 21, 24 and 25-44, comprising the modified nucleoside. 46. The pharmaceutical composition of embodiment 45, wherein the modified nucleoside comprises a locked nucleic acid (LNA), hexitol nucleic acid (HLA), cyclohexene nucleic acid (CeNA), 2′-methoxyethyl, 2′-O-alkyl, 2′-O-allyl, 2′-O-allyl, 2′-fluoro, or 2′-deoxy, or a combination thereof. 47. The pharmaceutical composition of embodiment 45 or embodiment 46, wherein the modified nucleoside comprises a 2′-O-methyl nucleoside, 2′-deoxyfluoro nucleoside, 2′-O—N-methylacetamido (2′-O-NMA) nucleoside, a 2′-O-dimethylaminoethoxyethyl (2′-O-DMAEOE) nucleoside, 2′-O-aminopropyl (2′-O-AP) nucleoside, or 2′-ara-F, or a combination thereof.

[0300] 48. The pharmaceutical composition of any one of embodiments 45-47, wherein the modified nucleoside comprises one or more 2′fluoro modified nucleosides. 49. The pharmaceutical composition of embodiment 48, wherein the one or more 2′ fluoro modified nucleosides is about 1, 2, 3, 4, 5, 6, 7, 8, 9, 10, 11, 12, 13, 14, 15, 16, 17, 18, 19, 20, 21, 22, 23, 24, 25, 26, 27, 28, 29, 30, 31, 32, 33, 34, 35, 36, 37, 38, 39, 40, 41, or 42 2′ fluoro modified nucleosides.

[0301] 50. The pharmaceutical composition of embodiment 48 or embodiment 49, wherein the sense strand of the siRNA comprises one or more 2′ fluoro modified nucleosides. 51. The pharmaceutical composition of embodiment 50, wherein the one or more 2′ fluoro modified nucleosides of the sense strand is about 1, 2, 3, 4, 5, 6, 7, 8, 9, 10, 11, 12, 13, 14, 15, 16, 17, 18, 19, 20, or 21 2′ fluoro modified nucleosides. 52. The pharmaceutical composition of embodiment 51, wherein the one or more 2′ fluoro modified nucleosides of the sense strand is about eleven 2′ fluoro modified nucleosides. 53. The pharmaceutical composition of embodiment 51, wherein the one or more 2′ fluoro modified nucleosides of the sense strand is about four 2′ fluoro modified nucleosides. 54. The pharmaceutical composition of embodiment 51, wherein the one or more 2′ fluoro modified nucleosides of the sense strand is about three 2′ fluoro modified nucleosides. 55. The pharmaceutical composition of any one of embodiments 50-54, wherein the first nucleoside of the sense strand comprises the 2′ fluoro modified nucleoside, in a 5′ to 3′ direction. 56. The pharmaceutical composition of any one of embodiments 50-55, wherein the third nucleoside of the sense strand comprises the 2′ fluoro modified nucleoside, in a 5′ to 3′ direction. 57. The pharmaceutical composition of any one of embodiments 50-56, wherein the fifth nucleoside of the sense strand comprises the 2′ fluoro modified nucleoside, in a 5′ to 3′ direction. 58. The pharmaceutical composition of any one of embodiments 50-57, wherein the seventh nucleoside of the sense strand comprises the 2′ fluoro modified nucleoside, in a 5′ to 3′ direction. 59. The pharmaceutical composition of any one of embodiments 50-58, wherein the eighth nucleoside of the sense strand comprises the 2′ fluoro modified nucleoside, in a 5′ to 3′ direction. 60. The pharmaceutical composition of any one of embodiments 50-59, wherein the ninth nucleoside of the sense strand comprises the 2′ fluoro modified nucleoside, in a 5′ to 3′ direction. 61. The pharmaceutical composition of any one of embodiments 50-60, wherein the eleventh nucleoside of the sense strand comprises the 2′ fluoro modified nucleoside, in a 5′ to 3′ direction. 62. The pharmaceutical composition of any one of embodiments 50-61, wherein the thirteenth nucleoside of the sense strand comprises the 2′ fluoro modified nucleoside, in a 5′ to 3′ direction. 63. The pharmaceutical composition of any one of embodiments 50-62, wherein the fifteenth nucleoside of the sense strand comprises the 2′ fluoro modified nucleoside, in a 5′ to 3′ direction. 64. The pharmaceutical composition of any one of embodiments 50-63, wherein the seventeenth nucleoside of the sense strand comprises the 2′ fluoro modified nucleoside, in a 5′ to 3′ direction. 65. The pharmaceutical composition of any one of embodiments 50-64, wherein the nineteenth nucleoside of the sense strand comprises the 2′ fluoro modified nucleoside, in a 5′ to 3′ direction. 66. The pharmaceutical composition of any one of embodiments 50-65, wherein the fifth, seventh, and ninth nucleosides of the sense strand comprises the 2′ fluoro modified nucleoside, in a 5′ to 3′ direction. 67. The pharmaceutical composition of any one of embodiments 50-66, wherein the sense strand comprises the pattern fN-Z1-fN-Z2-fN, wherein fN comprises the 2′ fluoro modified nucleoside and Z1 and Z2 are independently a 2′ O-methyl modified nucleoside or a 2′ fluoro modified nucleoside. 68. The pharmaceutical composition of embodiment 67, wherein the fN-Z1-fN-Z2-fN corresponds to nucleosides five to nine of the sense strand, in a 5′ to 3′ direction. 69. The pharmaceutical composition of any one of embodiments 50-68, wherein the sense strand comprises at least two contiguous 2′ fluoro modified nucleosides. 70. The pharmaceutical composition of embodiment 69, wherein the at least two contiguous 2′ fluoro modified nucleosides is two contiguous 2′ fluoro modified nucleosides. 71. The pharmaceutical composition of embodiment 69, wherein the at least two contiguous 2′ fluoro modified nucleosides is three contiguous 2′ fluoro modified nucleosides.

[0302] 72. The pharmaceutical composition of any one of embodiments 48-71, wherein the antisense strand of the siRNA comprises one or more 2′ fluoro modified nucleosides. 73. The pharmaceutical composition of embodiment 72, wherein the one or more 2′ fluoro modified nucleosides of the antisense strand is about 1, 2, 3, 4, 5, 6, 7, 8, 9, 10, 11, 12, 13, 14, 15, 16, 17, 18, 19, 20, or 21 2′ fluoro modified nucleosides. 74. The pharmaceutical composition of embodiment 73, wherein the one or more 2′ fluoro modified nucleosides of the antisense strand is about eight 2′ fluoro modified nucleosides. 75. The pharmaceutical composition of embodiment 73, wherein the one or more 2′ fluoro modified nucleosides of the antisense strand is about six 2′ fluoro modified nucleosides. 76. The pharmaceutical composition of embodiment 73, wherein the one or more 2′ fluoro modified nucleosides of the antisense strand is about five 2′ fluoro modified nucleosides. 77. The pharmaceutical composition of embodiment 73, wherein the one or more 2′ fluoro modified nucleosides of the antisense strand is about four 2′ fluoro modified nucleosides. 78. The pharmaceutical composition of any one of embodiments 72-77, wherein the second nucleoside of the antisense strand comprises the 2′ fluoro modified nucleoside, in a 5′ to 3′ direction. 79. The pharmaceutical composition of any one of embodiments 72-78, wherein the fourth nucleoside of the antisense strand comprises the 2′ fluoro modified nucleoside, in a 5′ to 3′ direction. 80. The pharmaceutical composition of any one of embodiments 72-79, wherein the sixth nucleoside of the antisense strand comprises the 2′ fluoro modified nucleoside, in a 5′ to 3′ direction. 81. The pharmaceutical composition of any one of embodiments 72-80, wherein the eighth nucleoside of the antisense strand comprises the 2′ fluoro modified nucleoside, in a 5′ to 3′ direction. 82. The pharmaceutical composition of any one of embodiments 72-81, wherein the ninth nucleoside of the antisense strand comprises the 2′ fluoro modified nucleoside, in a 5′ to 3′ direction. 83. The pharmaceutical composition of any one of embodiments 72-82, wherein the tenth nucleoside of the antisense strand comprises the 2′ fluoro modified nucleoside, in a 5′ to 3′ direction. 84. The pharmaceutical composition of any one of embodiments 72-83, wherein the fourteenth nucleoside of the antisense strand comprises the 2′ fluoro modified nucleoside, in a 5′ to 3′ direction. 85. The pharmaceutical composition of any one of embodiments 72-84, wherein the sixteenth nucleoside of the antisense strand comprises the 2′ fluoro modified nucleoside, in a 5′ to 3′ direction. 86. The pharmaceutical composition of any one of embodiments 72-85, wherein the eighteenth nucleoside of the antisense strand comprises the 2′ fluoro modified nucleoside, in a 5′ to 3′ direction. 87. The pharmaceutical composition of any one of embodiments 72-86, wherein the second and fourteenth nucleosides of the antisense strand comprises the 2′ fluoro modified nucleoside, in a 5′ to 3′ direction. 88. The pharmaceutical composition of any one of embodiments 72-88, wherein the second, sixth, fourteenth, and sixteenth nucleosides of the antisense strand comprises the 2′ fluoro modified nucleoside, in a 5′ to 3′ direction. 89. The pharmaceutical composition of any one of embodiments 72-88, wherein the antisense strand comprises the pattern Z3-fN-Z4-fN, wherein fN comprises the 2′ fluoro modified nucleoside and Z3 and Z4 are independently a 2′ O-methyl modified nucleoside or a 2′ fluoro modified nucleoside. 90. The pharmaceutical composition of embodiment 89, wherein the Z3-fN-Z4-fN corresponds to nucleosides thirteen to sixteen of the antisense strand, in a 5′ to 3′ direction.

[0303] 91. The pharmaceutical composition of any one of embodiments 45-90, wherein the modified nucleoside comprises a 2′ O-alkyl modified nucleoside. 92. The pharmaceutical composition of embodiment 91, wherein the 2′-O-alkyl modified nucleoside comprises one or more 2′ O-methyl modified nucleosides. 93. The pharmaceutical composition of embodiment 92, wherein the one or more 2′ O-methyl modified nucleosides is about 1, 2, 3, 4, 5, 6, 7, 8, 9, 10, 11, 12, 13, 14, 15, 16, 17, 18, 19, 20, 21, 22, 23, 24, 25, 26, 27, 28, 29, 30, 31, 32, 33, 34, 35, 36, 37, 38, 39, 40, 41, or 42 2′ O-methyl modified nucleosides.

[0304] 94. The pharmaceutical composition of any one of embodiments 91-93, wherein the sense strand of the siRNA comprises one or more 2′ O-methyl modified nucleosides. 95. The pharmaceutical composition of embodiment 94, wherein the one or more 2′ O-methyl modified nucleosides of the sense strand is about 1, 2, 3, 4, 5, 6, 7, 8, 9, 10, 11, 12, 13, 14, 15, 16, 17, 18, 19, 20, or 21 2′ O-methyl modified nucleosides. 96. The pharmaceutical composition of embodiment 95, wherein the one or more 2′ O-methyl modified nucleosides of the sense strand is about ten 2′ O-methyl modified nucleosides. 97. The pharmaceutical composition of embodiment 95, wherein the one or more 2′ O-methyl modified nucleosides of the sense strand is about seventeen 2′ O-methyl modified nucleosides. 98. The pharmaceutical composition of embodiment 95, wherein the one or more 2′ O-methyl modified nucleosides of the sense strand is about eighteen 2′ O-methyl modified nucleosides. 99. The pharmaceutical composition of any one of embodiments 94-98, wherein the first nucleoside of the sense strand comprises the 2′ O-methyl modified nucleoside, in a 5′ to 3′ direction. 100. The pharmaceutical composition of any one of embodiments 94-99, wherein the second nucleoside of the sense strand comprises the 2′ O-methyl modified nucleoside, in a 5′ to 3′ direction. 101. The pharmaceutical composition of any one of embodiments 94-100, wherein the third nucleoside of the sense strand comprises the 2′ O-methyl modified nucleoside, in a 5′ to 3′ direction. 102. The pharmaceutical composition of any one of embodiments 94-101, wherein the fourth nucleoside of the sense strand comprises the 2′ O-methyl modified nucleoside, in a 5′ to 3′ direction. 103. The pharmaceutical composition of any one of embodiments 94-102, wherein the sixth nucleoside of the sense strand comprises the 2′ O-methyl modified nucleoside, in a 5′ to 3′ direction. 104. The pharmaceutical composition of any one of embodiments 94-103, wherein the eighth nucleoside of the sense strand comprises the 2′ O-methyl modified nucleoside, in a 5′ to 3′ direction. 105. The pharmaceutical composition of any one of embodiments 94-104, wherein the tenth nucleoside of the sense strand comprises the 2′ O-methyl modified nucleoside, in a 5′ to 3′ direction. 106. The pharmaceutical composition of any one of embodiments 94-105, wherein the eleventh nucleoside of the sense strand comprises the 2′ O-methyl modified nucleoside, in a 5′ to 3′ direction. 107. The pharmaceutical composition of any one of embodiments 94-106, wherein the twelfth nucleoside of the sense strand comprises the 2′ O-methyl modified nucleoside, in a 5′ to 3′ direction. 108. The pharmaceutical composition of any one of embodiments 94-107, wherein the thirteenth nucleoside of the sense strand comprises the 2′ O-methyl modified nucleoside, in a 5′ to 3′ direction. 109. The pharmaceutical composition of any one of embodiments 94-108, wherein the fourteenth nucleoside of the sense strand comprises the 2′ O-methyl modified nucleoside, in a 5′ to 3′ direction. 110 The pharmaceutical composition of any one of embodiments 94-109, wherein the fifteenth nucleoside of the sense strand comprises the 2′ O-methyl modified nucleoside, in a 5′ to 3′ direction. 111. The pharmaceutical composition of any one of embodiments 94-110, wherein the sixteenth nucleoside of the sense strand comprises the 2′ O-methyl modified nucleoside, in a 5′ to 3′ direction. 112. The pharmaceutical composition of any one of embodiments 94-111, wherein the seventeenth nucleoside of the sense strand comprises the 2′ O-methyl modified nucleoside, in a 5′ to 3′ direction. 113. The pharmaceutical composition of any one of embodiments 94-112, wherein the eighteenth nucleoside of the sense strand comprises the 2′ O-methyl modified nucleoside, in a 5′ to 3′ direction. 114. The pharmaceutical composition of any one of embodiments 94-113, wherein the nineteenth nucleoside of the sense strand comprises the 2′ O-methyl modified nucleoside, in a 5′ to 3′ direction. 115. The pharmaceutical composition of any one of embodiments 94-114, wherein the twentieth nucleoside of the sense strand comprises the 2′ O-methyl modified nucleoside, in a 5′ to 3′ direction. 116. The pharmaceutical composition of any one of embodiments 94-115, wherein the twenty-first nucleoside of the sense strand comprises the 2′ O-methyl modified nucleoside, in a 5′ to 3′ direction. 117. The pharmaceutical composition of any one of embodiments 94-116, wherein the second, fourth, sixth, tenth, twelfth, fourteenth, and sixteenth, eighteenth, twentieth, and twenty-first nucleosides of the sense strand comprises the 2′ O-methyl modified nucleoside, in a 5′ to 3′ direction. 118. The pharmaceutical composition of any one of embodiments 94-117, wherein the sense strand comprises the pattern mN-Z5-mN-Z6, wherein mN comprises the 2′ O-methyl modified nucleoside and Z5 and Z6 are independently a 2′ O-methyl modified nucleoside or a 2′ fluoro modified nucleoside. 119. The pharmaceutical composition of embodiment 118, wherein the mN-Z5-mN-Z6-mN corresponds to nucleosides four to seven of the sense strand, in a 5′ to 3′ direction. 120. The pharmaceutical composition of embodiment 118 or embodiment 119, wherein Z5 is the 2′ fluoro modified nucleoside. 121. The pharmaceutical composition of embodiment 118 or embodiment 119, wherein Z5 is the 2′ O-methyl modified nucleoside. 122. The pharmaceutical composition of any one of embodiments 118-121, wherein Z6 is the 2′ fluoro modified nucleoside. 123. The pharmaceutical composition of any one of embodiments 118-121, wherein Z6 is the 2′ O-methyl modified nucleoside. 124. The pharmaceutical composition of any one of embodiments 94-123, wherein the sense strand comprises the pattern mN-Z5-mN-Z6-mN, wherein mN comprises the 2′ O-methyl modified nucleoside and Z5 and Z6 are independently a 2′ O-methyl modified nucleoside or a 2′ fluoro modified nucleoside. 125. The pharmaceutical composition of embodiment 124, wherein the mN-Z5-mN-Z6-mN corresponds to nucleosides two to six of the sense strand, in a 5′ to 3′ direction. 126. The pharmaceutical composition of embodiment 124, wherein the mN-Z5-mN-Z6-mN corresponds to nucleosides ten to fourteen of the sense strand, in a 5′ to 3′ direction. 127. The pharmaceutical composition of embodiment 124, wherein the mN-Z5-mN-Z6-mN corresponds to nucleosides twelve to sixteen of the sense strand, in a 5′ to 3′ direction. 128. The pharmaceutical composition of embodiment 124, wherein the mN-Z5-mN-Z6-mN corresponds to nucleosides fourteen to eighteen of the sense strand, in a 5′ to 3′ direction. 129. The pharmaceutical composition of embodiment 124, wherein the mN-Z5-mN-Z6-mN corresponds to nucleosides sixteen to twenty of the sense strand, in a 5′ to 3′ direction. 130. The pharmaceutical composition of any one of embodiments 94-129, wherein the sense strand comprises the pattern mN-Z5-mN-Z6-mN-Z7-mN, wherein Z7 is a 2′ O-methyl modified nucleoside or a 2′ fluoro modified nucleoside. 131. The pharmaceutical composition of embodiment 130, wherein the mN-Z5-mN-Z6-mN-Z7-mN corresponds to nucleosides ten to sixteen of the sense strand, in a 5′ to 3′ direction. 132. The pharmaceutical composition of embodiment 130, wherein the mN-Z5-mN-Z6-mN-Z7-mN corresponds to nucleosides twelve to eighteen of the sense strand, in a 5′ to 3′ direction. 133. The pharmaceutical composition of embodiment 130, wherein the mN-Z5-mN-Z6-mN-Z7-mN corresponds to nucleosides fourteen to twenty of the sense strand, in a 5′ to 3′ direction. 134. The pharmaceutical composition of any one of embodiments 94-133, wherein the sense strand comprises the pattern mN-Z5-mN-Z6-mN-Z7-mN-Z8-mN, wherein Z8 is a 2′ O-methyl modified nucleoside or a 2′ fluoro modified nucleoside. 135. The pharmaceutical composition of embodiment 134, wherein the mN-Z5-mN-Z6-mN-Z7-mN-Z8-mN corresponds to nucleosides ten to eighteen of the sense strand, in a 5′ to 3′ direction. 136. The pharmaceutical composition of embodiment 134, wherein the mN-Z5-mN-Z6-mN-Z7-mN-Z8-mN corresponds to nucleosides twelve to twenty of the sense strand, in a 5′ to 3′ direction. 137. The pharmaceutical composition of any one of embodiments 94-136, wherein the sense strand comprises the pattern mN-Z5-mN-Z6-mN-Z7-mN-Z8-mN-Z9-mN, wherein Z9 is a 2′ O-methyl modified nucleoside or a 2′ fluoro modified nucleoside. 138. The pharmaceutical composition of embodiment 137, wherein the mN-Z5-mN-Z6-mN-Z7-mN-Z8-mN-Z9-mN corresponds to nucleosides ten to twenty of the sense strand, in a 5′ to 3′ direction. 139. The pharmaceutical composition of any one of embodiments 94-137, wherein the sense strand comprises at least two contiguous 2′ O-methyl modified nucleosides. 140. The pharmaceutical composition of embodiment 139, wherein the at least two contiguous 2′ O-methyl modified nucleosides is three contiguous 2′ O-methyl modified nucleosides. 141. The pharmaceutical composition of embodiment 139, wherein the at least two contiguous 2′ O-methyl modified nucleosides is four contiguous 2′ O-methyl modified nucleosides. 142. The pharmaceutical composition of embodiment 139, wherein the at least two contiguous 2′ O-methyl modified nucleosides is five contiguous 2′ O-methyl modified nucleosides. 143. The pharmaceutical composition of embodiment 139, wherein the at least two contiguous 2′ O-methyl modified nucleosides is six contiguous 2′ O-methyl modified nucleosides. 144. The pharmaceutical composition of embodiment 139, wherein the at least two contiguous 2′ O-methyl modified nucleosides is seven contiguous 2′ O-methyl modified nucleosides. 145. The pharmaceutical composition of embodiment 139, wherein the at least two contiguous 2′ O-methyl modified nucleosides is eight contiguous 2′ O-methyl modified nucleosides. 146. The pharmaceutical composition of embodiment 139, wherein the at least two contiguous 2′ O-methyl modified nucleosides is nine contiguous 2′ O-methyl modified nucleosides. 147. The pharmaceutical composition of embodiment 139, wherein the at least two contiguous 2′ O-methyl modified nucleosides is ten contiguous 2′ O-methyl modified nucleosides. 148. The pharmaceutical composition of embodiment 139, wherein the at least two contiguous 2′ O-methyl modified nucleosides is eleven contiguous 2′ O-methyl modified nucleosides. 149. The pharmaceutical composition of embodiment 139, wherein the at least two contiguous 2′ O-methyl modified nucleosides is twelve contiguous 2′ O-methyl modified nucleosides.

[0305] 150. The pharmaceutical composition of any one of embodiments 91-149, wherein the antisense strand of the siRNA comprises one or more 2′ O-methyl modified nucleosides. 151. The pharmaceutical composition of embodiment 150, wherein the one or more 2′ O-methyl modified nucleosides of the antisense strand is about 1, 2, 3, 4, 5, 6, 7, 8, 9, 10, 11, 12, 13, 14, 15, 16, 17, 18, 19, 20, or 21 2′ O-methyl modified nucleosides. 152. The pharmaceutical composition of embodiment 151, wherein the one or more 2′ O-methyl modified nucleosides of the antisense strand is about thirteen 2′ O-methyl modified nucleosides. 153. The pharmaceutical composition of embodiment 151, wherein the one or more 2′ O-methyl modified nucleosides of the antisense strand is about fifteen 2′ O-methyl modified nucleosides. 154. The pharmaceutical composition of embodiment 151, wherein the one or more 2′ O-methyl modified nucleosides of the antisense strand is about seventeen 2′ O-methyl modified nucleosides. 155. The pharmaceutical composition of any one of embodiments 150-154, wherein the first nucleoside of the antisense strand comprises the 2′ O-methyl modified nucleoside, in a 5′ to 3′ direction. 156. The pharmaceutical composition of any one of embodiments 150-155, wherein the third nucleoside of the antisense strand comprises the 2′ O-methyl modified nucleoside, in a 5′ to 3′ direction. 157. The pharmaceutical composition of any one of embodiments 150-156, wherein the fourth nucleoside of the antisense strand comprises the 2′ O-methyl modified nucleoside, in a 5′ to 3′ direction. 158. The pharmaceutical composition of any one of embodiments 150-157, wherein the fifth nucleoside of the antisense strand comprises the 2′ O-methyl modified nucleoside, in a 5′ to 3′ direction. 159. The pharmaceutical composition of any one of embodiments 150-158, wherein the seventh nucleoside of the antisense strand comprises the 2′ O-methyl modified nucleoside, in a 5′ to 3′ direction. 160. The pharmaceutical composition of any one of embodiments 150-159, wherein the eighth nucleoside of the antisense strand comprises the 2′ O-methyl modified nucleoside, in a 5′ to 3′ direction. 161. The pharmaceutical composition of any one of embodiments 150-160, wherein the ninth nucleoside of the antisense strand comprises the 2′ O-methyl modified nucleoside, in a 5′ to 3′ direction. 162. The pharmaceutical composition of any one of embodiments 150-161, wherein the tenth nucleoside of the antisense strand comprises the 2′ O-methyl modified nucleoside, in a 5′ to 3′ direction. 163. The pharmaceutical composition of any one of embodiments 150-162, wherein the eleventh nucleoside of the antisense strand comprises the 2′ O-methyl modified nucleoside, in a 5′ to 3′ direction. 164. The pharmaceutical composition of any one of embodiments 150-163, wherein the twelfth nucleoside of the antisense strand comprises the 2′ O-methyl modified nucleoside, in a 5′ to 3′ direction. 165. The pharmaceutical composition of any one of embodiments 150-164, wherein the thirteenth nucleoside of the antisense strand comprises the 2′ O-methyl modified nucleoside, in a 5′ to 3′ direction. 166. The pharmaceutical composition of any one of embodiments 150-165, wherein the fifteenth nucleoside of the antisense strand comprises the 2′ O-methyl modified nucleoside, in a 5′ to 3′ direction. 167. The pharmaceutical composition of any one of embodiments 150-166, wherein the seventeenth nucleoside of the antisense strand comprises the 2′ O-methyl modified nucleoside, in a 5′ to 3′ direction. 168. The pharmaceutical composition of any one of embodiments 150-167, wherein the eighteenth nucleoside of the antisense strand comprises the 2′ O-methyl modified nucleoside, in a 5′ to 3′ direction. 169. The pharmaceutical composition of any one of embodiments 150-168, wherein the nineteenth nucleoside of the antisense strand comprises the 2′ O-methyl modified nucleoside, in a 5′ to 3′ direction. 170. The pharmaceutical composition of any one of embodiments 150-169, wherein the twentieth nucleoside of the antisense strand comprises the 2′ O-methyl modified nucleoside, in a 5′ to 3′ direction. 171. The pharmaceutical composition of any one of embodiments 150-170, wherein the twenty-first nucleoside of the antisense strand comprises the 2′ O-methyl modified nucleoside, in a 5′ to 3′ direction. 172. The pharmaceutical composition of any one of embodiments 150-171, wherein the first, third, fifth, seventh, eleventh, twelfth, thirteenth, fifteenth, seventeenth, nineteenth, twentieth, and twenty-first nucleosides of the antisense strand comprises the 2′ O-methyl modified nucleoside, in a 5′ to 3′ direction. 173. The pharmaceutical composition of any one of embodiments 150-172, wherein the antisense strand comprises at least two contiguous 2′ O-methyl modified nucleosides. 174. The pharmaceutical composition of embodiment 173, wherein the at least two contiguous 2′ O-methyl modified nucleosides is three contiguous 2′ O-methyl modified nucleosides. 175. The pharmaceutical composition of embodiment 173, wherein the at least two contiguous 2′ O-methyl modified nucleosides is four contiguous 2′ O-methyl modified nucleosides. 176. The pharmaceutical composition of embodiment 173, wherein the at least two contiguous 2′ O-methyl modified nucleosides is five contiguous 2′ O-methyl modified nucleosides. 177. The pharmaceutical composition of embodiment 173, wherein the at least two contiguous 2′ O-methyl modified nucleosides is six contiguous 2′ O-methyl modified nucleosides. 178. The pharmaceutical composition of embodiment 173, wherein the at least two contiguous 2′ O-methyl modified nucleosides is seven contiguous 2′ O-methyl modified nucleosides. 179. The pharmaceutical composition of any one of embodiments 150-178, wherein the antisense strand comprises a first sequence comprising at least two contiguous 2′ O-methyl modified nucleosides and a second sequence comprising at least two contiguous 2′ O-methyl modified nucleosides. 180. The pharmaceutical composition of embodiment 179, wherein the first sequence comprises at least three contiguous 2′ O-methyl modified nucleosides, and the second sequence comprises at least three contiguous 2′ O-methyl modified nucleosides. 181. The pharmaceutical composition of embodiment 180, wherein the first sequence comprises three contiguous 2′ O-methyl modified nucleosides, and the second sequence comprises three contiguous 2′ O-methyl modified nucleosides. 182. The pharmaceutical composition of embodiment 180, wherein the first sequence comprises four contiguous 2′ O-methyl modified nucleosides, and the second sequence comprises five contiguous 2′ O-methyl modified nucleosides. 183. The pharmaceutical composition of embodiment 180, wherein the first sequence comprises seven contiguous 2′ O-methyl modified nucleosides, and the second sequence comprises five contiguous 2′ O-methyl modified nucleosides. 184. The pharmaceutical composition of embodiment 180, wherein the first sequence comprises at least four contiguous 2′ O-methyl modified nucleosides. 185. The pharmaceutical composition of embodiment 180, wherein the first sequence comprises at least five contiguous 2′ O-methyl modified nucleosides. 186. The pharmaceutical composition of embodiment 180, wherein the first sequence comprises at least six contiguous 2′ O-methyl modified nucleosides. 187. The pharmaceutical composition of embodiment 180, wherein the first sequence comprises at least seven contiguous 2′ O-methyl modified nucleosides. 188. The pharmaceutical composition of any one of embodiments 184-187, wherein the second sequence comprises at least four contiguous 2′ O-methyl modified nucleosides. 189. The pharmaceutical composition of any one of embodiments 184-187, wherein the second sequence comprises at least five contiguous 2′ O-methyl modified nucleosides. 190. The pharmaceutical composition of any one of embodiments 184-187, wherein the second sequence comprises at least six contiguous 2′ O-methyl modified nucleosides. 191. The pharmaceutical composition of any one of embodiments 184-187, wherein the second sequence comprises at least seven contiguous 2′ O-methyl modified nucleosides.

[0306] 192. The pharmaceutical composition of any one of embodiments 1-191, wherein the sense strand comprises a ribose. 193. The pharmaceutical composition of embodiment 192, wherein the sense strand comprises about 1, 2, 3, 4, 5, 6, 7, 8, 9, 10, 11, 12, 13, 14, 15, 16, 17, 18, 19, 20, or 21 ribose. 194. The pharmaceutical composition of embodiment 192 or embodiment 193, wherein the first nucleoside of the sense strand comprises the ribose, in a 5′ to 3′ direction. 195. The pharmaceutical composition of any one of embodiments 192-194, wherein the second nucleoside of the sense strand comprises the ribose, in a 5′ to 3′ direction. 196. The pharmaceutical composition of any one of embodiments 192-195, wherein the third nucleoside of the sense strand comprises the ribose, in a 5′ to 3′ direction. 197. The pharmaceutical composition of any one of embodiments 192-196, wherein the fourth nucleoside of the sense strand comprises the ribose, in a 5′ to 3′ direction. 198. The pharmaceutical composition of any one of embodiments 192-197, wherein the fifth nucleoside of the sense strand comprises the ribose, in a 5′ to 3′ direction. 199. The pharmaceutical composition of any one of embodiments 192-198, wherein the sixth nucleoside of the sense strand comprises the ribose, in a 5′ to 3′ direction. 200. The pharmaceutical composition of any one of embodiments 192-199, wherein the seventh nucleoside of the sense strand comprises the ribose, in a 5′ to 3′ direction. 201. The pharmaceutical composition of any one of embodiments 192-200, wherein the eighth nucleoside of the sense strand comprises the ribose, in a 5′ to 3′ direction. 202. The pharmaceutical composition of any one of embodiments 192-201, wherein the ninth nucleoside of the sense strand comprises the ribose, in a 5′ to 3′ direction. 203. The pharmaceutical composition of any one of embodiments 192-202, wherein the tenth nucleoside of the sense strand comprises the ribose, in a 5′ to 3′ direction. 204. The pharmaceutical composition of any one of embodiments 192-203, wherein the eleventh nucleoside of the sense strand comprises the ribose, in a 5′ to 3′ direction. 205. The pharmaceutical composition of any one of embodiments 192-204, wherein the twelfth nucleoside of the sense strand comprises the ribose, in a 5′ to 3′ direction. 206. The pharmaceutical composition of any one of embodiments 192-205, wherein the thirteenth nucleoside of the sense strand comprises the ribose, in a 5′ to 3′ direction. 207. The pharmaceutical composition of any one of embodiments 192-206, wherein the fourteenth nucleoside of the sense strand comprises the ribose, in a 5′ to 3′ direction. 208. The pharmaceutical composition of any one of embodiments 192-207, wherein the fifteenth nucleoside of the sense strand comprises the ribose, in a 5′ to 3′ direction. 209. The pharmaceutical composition of any one of embodiments 192-208, wherein the sixteenth nucleoside of the sense strand comprises the ribose, in a 5′ to 3′ direction. 210. The pharmaceutical composition of any one of embodiments 192-209, wherein the seventeenth nucleoside of the sense strand comprises the ribose, in a 5′ to 3′ direction. 211. The pharmaceutical composition of any one of embodiments 192-210, wherein the eighteenth nucleoside of the sense strand comprises the ribose, in a 5′ to 3′ direction. 212. The pharmaceutical composition of any one of embodiments 192-211, wherein the nineteenth nucleoside of the sense strand comprises the ribose, in a 5′ to 3′ direction. 213. The pharmaceutical composition of any one of embodiments 192-212, wherein the twentieth nucleoside of the sense strand comprises the ribose, in a 5′ to 3′ direction. 214. The pharmaceutical composition of any one of embodiments 192-213, wherein the twenty-first nucleoside of the sense strand comprises the ribose, in a 5′ to 3′ direction. 215. The pharmaceutical composition of any one of embodiments 1-214, wherein the antisense strand comprises a ribose. 216. The pharmaceutical composition of embodiment 215, wherein the antisense strand comprises about 1, 2, 3, 4, 5, 6, 7, 8, 9, 10, 11, 12, 13, 14, 15, 16, 17, 18, 19, 20, or 21 ribose. 217. The pharmaceutical composition of embodiment 215 or embodiment 216, wherein the first nucleoside of the antisense strand comprises the ribose, in a 5′ to 3′ direction. 218. The pharmaceutical composition of any one of embodiments 215-217, wherein the second nucleoside of the antisense strand comprises the ribose, in a 5′ to 3′ direction. 219. The pharmaceutical composition of any one of embodiments 215-218, wherein the third nucleoside of the antisense strand comprises the ribose, in a 5′ to 3′ direction. 220. The pharmaceutical composition of any one of embodiments 215-219, wherein the fourth nucleoside of the antisense strand comprises the ribose, in a 5′ to 3′ direction. 221. The pharmaceutical composition of any one of embodiments 215-220, wherein the fifth nucleoside of the antisense strand comprises the ribose, in a 5′ to 3′ direction. 222. The pharmaceutical composition of any one of embodiments 215-221, wherein the sixth nucleoside of the antisense strand comprises the ribose, in a 5′ to 3′ direction. 223. The pharmaceutical composition of any one of embodiments 215-222, wherein the seventh nucleoside of the antisense strand comprises the ribose, in a 5′ to 3′ direction. 224. The pharmaceutical composition of any one of embodiments 215-223, wherein the eighth nucleoside of the antisense strand comprises the ribose, in a 5′ to 3′ direction. 225. The pharmaceutical composition of any one of embodiments 215-224, wherein the ninth nucleoside of the antisense strand comprises the ribose, in a 5′ to 3′ direction. 226. The pharmaceutical composition of any one of embodiments 215-225, wherein the tenth nucleoside of the sense antisense comprises the ribose, in a 5′ to 3′ direction. 227. The pharmaceutical composition of any one of embodiments 215-226, wherein the eleventh nucleoside of the antisense strand comprises the ribose, in a 5′ to 3′ direction. 228. The pharmaceutical composition of any one of embodiments 215-227, wherein the twelfth nucleoside of the antisense strand comprises the ribose, in a 5′ to 3′ direction. 229. The pharmaceutical composition of any one of embodiments 215-228, wherein the thirteenth nucleoside of the antisense strand comprises the ribose, in a 5′ to 3′ direction. 230. The pharmaceutical composition of any one of embodiments 215-229, wherein the fourteenth nucleoside of the antisense strand comprises the ribose, in a 5′ to 3′ direction. 231. The pharmaceutical composition of any one of embodiments 215-230, wherein the fifteenth nucleoside of the antisense strand comprises the ribose, in a 5′ to 3′ direction. 232. The pharmaceutical composition of any one of embodiments 215-231, wherein the sixteenth nucleoside of the antisense strand comprises the ribose, in a 5′ to 3′ direction. 233. The pharmaceutical composition of any one of embodiments 215-232, wherein the seventeenth nucleoside of the antisense strand comprises the ribose, in a 5′ to 3′ direction. 234. The pharmaceutical composition of any one of embodiments 215-233, wherein the eighteenth nucleoside of the antisense strand comprises the ribose, in a 5′ to 3′ direction. 235. The pharmaceutical composition of any one of embodiments 215-234, wherein the nineteenth nucleoside of the antisense strand comprises the ribose, in a 5′ to 3′ direction. 236. The pharmaceutical composition of any one of embodiments 215-235, wherein the twentieth nucleoside of the antisense strand comprises the ribose, in a 5′ to 3′ direction. 237. The pharmaceutical composition of any one of embodiments 215-236, wherein the twenty-first nucleoside of the antisense strand comprises the ribose, in a 5′ to 3′ direction.

[0307] 238. The pharmaceutical composition of any one of embodiments 1-237, further comprising a lipid attached at either 3′ or 5′ terminus of the sense strand and/or antisense strand of the siRNA. 239. The pharmaceutical composition of embodiment 238, wherein the lipid comprises cholesterol, myristoyl, palmitoyl, stearoyl, lithocholoyl, docosanoyl, docosahexaenoyl, myristyl, palmityl stearyl, or α-tocopherol, or a combination thereof. 240. The pharmaceutical composition of embodiment 238 or embodiment 239, wherein the lipid comprises a first lipid on the sense strand and a second lipid on the antisense strand. 241. The pharmaceutical composition of any one of embodiments 238-240, wherein the lipid is positioned on the sense strand. 242. The pharmaceutical composition of embodiment 241, wherein the lipid is positioned at the 5′ end of the sense strand. 243. The pharmaceutical composition of embodiment 241, wherein the lipid is positioned at the 3′ end of the sense strand. 244. The pharmaceutical composition of any one of embodiments 238-243, wherein the lipid is positioned on the antisense strand. 245. The pharmaceutical composition of embodiment 244, wherein the lipid is positioned at the 5′ end of the antisense strand. 246. The pharmaceutical composition of embodiment 244, wherein the lipid is positioned at the 3′ end of the antisense strand.

[0308] 247. The pharmaceutical composition of any one of embodiments 1-246, wherein the sense strand and the antisense strand form a double-stranded RNA duplex. 248. The pharmaceutical composition of embodiment 247, wherein the double-stranded RNA duplex comprises from about 14 to about 30 nucleosides. 249. The pharmaceutical composition of embodiment 248, wherein the double-stranded RNA duplex comprises from about 17 to about 30 nucleosides. 250. The pharmaceutical composition of embodiment 249, wherein the double-stranded RNA duplex comprises about 21 nucleosides. 251. The pharmaceutical composition of any one of embodiments 247-250, wherein the double-stranded RNA duplex comprises at least one base pair. 252. The pharmaceutical composition of embodiment 251, wherein the first base pair of the double-stranded RNA duplex is an AU base pair.

[0309] 253. The pharmaceutical composition of any one of embodiments 1-252, wherein the sense strand comprises pattern 1S: 5′ fN s mN s fN-mN-fN-mN-fN-fN-fN-mN-fN-mN-fN-mN-fN-mN-fN-mN-fN s mN s mN 3′, wherein “fN” is a 2′ fluoro-modified nucleoside, “mN” is a 2′ O-methyl modified nucleoside, “-” is a phosphodiester, and “s” is a phosphorothioate. 254. The pharmaceutical composition of any one of embodiments 1-252, wherein the sense strand comprises pattern 2S: 5′ mN s mN s mN-mN-fN-mN-fN-fN-fN-mN-mN-mN-mN-mN-mN-mN-mN-mN-mN s mN s mN 3′, wherein “fN” is a 2′ fluoro-modified nucleoside, “mN” is a 2′ O-methyl modified nucleoside, “-” is a phosphodiester, and “s” is a phosphorothioate. 255. The pharmaceutical composition of any one of embodiments 1-252, wherein the sense strand comprises pattern 3S: 5′ mN s mN s mN-mN-fN-mN-fN-mN-fN-mN-mN-mN-mN-mN-mN-mN-mN-mN-mN s mN s mN 3′, wherein “fN” is a 2′ fluoro-modified nucleoside, “mN” is a 2′ O-methyl modified nucleoside, “-” is a phosphodiester, and “s” is a phosphorothioate. 256. The pharmaceutical composition of any one of embodiments 1-252, wherein the sense strand comprises pattern 4S: 5′ fN s mN s fN-mN-fN-mN-fN-fN-fN-mN-fN-mN-fN-mN-fN-mN-fN-mN-fN s mN s mN-N-Lipid 3′, wherein “fN” is a 2′ fluoro-modified nucleoside, “mN” is a 2′ O-methyl modified nucleoside, “-” is a phosphodiester, “s” is a phosphorothioate, and N comprises one or more nucleosides. 257. The pharmaceutical composition of embodiment 256, wherein the one or more nucleosides is three nucleosides. 258. The pharmaceutical composition of embodiment 256 or embodiment 257, wherein each of the one or more nucleosides independently comprise a ribose or deoxyribose. 259. The pharmaceutical composition of any one of embodiments 1-252, wherein the sense strand comprises pattern 5S: 5′ mN s mN s mN-mN-fN-mN-fN-fN-fN-mN-mN-mN-mN-mN-mN-mN-mN-mN-mN s mN s mN-N-Lipid 3′, wherein “fN” is a 2′ fluoro-modified nucleoside, “mN” is a 2′ O-methyl modified nucleoside, “-” is a phosphodiester, “s” is a phosphorothioate, and N comprises one or more nucleosides. 260. The pharmaceutical composition of embodiment 259, wherein the one or more nucleosides is three nucleosides. 261. The pharmaceutical composition of embodiment 259 or embodiment 260, wherein each of the one or more nucleosides independently comprise a ribose or deoxyribose. 262. The pharmaceutical composition of any one of embodiments 1-261, wherein the antisense strand comprises pattern 1AS: 5′ mN s fN s mN-fN-mN-fN-mN-fN-mN-fN-mN-mN-mN-fN-mN-fN-mN-fN-mN s mN s mN 3′, wherein “fN” is a 2′ fluoro-modified nucleoside, “mN” is a 2′ O-methyl modified nucleoside, “-” is a phosphodiester, and “s” is a phosphorothioate. 263. The pharmaceutical composition of any one of embodiments 1-261, wherein the antisense strand comprises pattern 2AS: 5′ mN s fN s mN-mN-mN-fN-mN-fN-fN-mN-mN-mN-mN-fN-mN-fN-mN-mN-mN s mN s mN 3′, wherein “fN” is a 2′ fluoro-modified nucleoside, “mN” is a 2′ O-methyl modified nucleoside, “-” is a phosphodiester, and “s” is a phosphorothioate. 264. The pharmaceutical composition of any one of embodiments 1-261, wherein the antisense strand comprises pattern 3AS: 5′ mN s fN s mN-mN-mN-fN-mN-mN-mN-mN-mN-mN-mN-fN-mN-fN-mN-mN-mN s mN s mN 3′, wherein “fN” is a 2′ fluoro-modified nucleoside, “mN” is a 2′ O-methyl modified nucleoside, “-” is a phosphodiester, and “s” is a phosphorothioate. 265. The pharmaceutical composition of any one of embodiments 1-261, wherein the antisense strand comprises pattern 4AS: 5′ mN s fN s mN-fN-mN-fN-mN-mN-mN-mN-mN-mN-mN-fN-mN-fN-mN-mN-mN s mN s mN 3′, wherein “fN” is a 2′ fluoro-modified nucleoside, “mN” is a 2′ O-methyl modified nucleoside, “-” is a phosphodiester, and “s” is a phosphorothioate. 266. The pharmaceutical composition of any one of embodiments 1-252, wherein the sense strand comprises pattern 1S and the antisense strand comprises pattern 1AS. 267. The pharmaceutical composition of any one of embodiments 1-252, wherein the sense strand comprises pattern 2S and the antisense strand comprises pattern 2AS. 268. The pharmaceutical composition of any one of embodiments 1-252, wherein the sense strand comprises pattern 3S and the antisense strand comprises pattern 3AS. 269. The pharmaceutical composition of any one of embodiments 1-252, wherein the sense strand comprises pattern 4S and the antisense strand comprises pattern 4AS.

[0310] 270. The pharmaceutical composition of any one of embodiments 1-259, wherein the sense strand comprises a sequence of Formula IA: 5′ Z1-U-Z2-G-Z3-U-C-Z4-A-U-U-Z5-L 3′ wherein Z1 is 0, 3, 5, 11, or 13 nucleosides; Z2 is 1 nucleoside; Z3 is 0, 2, 5, 8, or 10 nucleosides; Z4 is 0, 2, 3, 5, 8, or 11 nucleosides; Z5 is 0 or 3 nucleosides; each “-” is independently a phosphodiester or modified internucleoside linkage; and L is an optional lipid. 271. The pharmaceutical composition of embodiment 270, wherein Z1 is 0 nucleosides. 272. The pharmaceutical composition of embodiment 270, wherein Z1 is 3, 5, 11, or 13 nucleosides. 273. The pharmaceutical composition of embodiment 272, wherein Z1 comprises UGGUG, CAGGU, CAGGUUUGCCACU (SEQ ID NO: 6007), GCACCUUUUCA (SEQ ID NO: 6008), or AGC, or a nucleic acid sequence thereof having about 1 or 2 nucleoside substitutions, additions, or deletions. 274. The pharmaceutical composition of any one of embodiments 270-273, wherein Z2 comprises C, G, or U. 275. The pharmaceutical composition of any one of embodiments 270-274, wherein Z3 is 0 nucleosides. 276. The pharmaceutical composition of any one of embodiments 270-274, wherein Z3 is 2, 5, 8, or 10 nucleosides. 277. The pharmaceutical composition of embodiment 276, wherein Z3 comprises UG, UGUCGAGAGA (SEQ ID NO: 6009), AGAGA, AGAGA, CCACUUUG, or AGCCU, or a nucleic acid sequence thereof having about 1 or 2 nucleoside substitutions, additions, or deletions. 278. The pharmaceutical composition of any one of embodiments 270-277, wherein Z4 is 0 nucleosides. 279. The pharmaceutical composition of any one of embodiments 270-277, wherein Z4 is 2, 3, 5, 8, or 11 nucleosides. 280. The pharmaceutical composition of embodiment 279, wherein Z4 comprises GAGAGAUCACU (SEQ ID NO: 6010), ACU, ACUGAAAU, UC, or CUAAC, or a nucleic acid sequence thereof having about 1 or 2 nucleoside substitutions, additions, or deletions. 281. The pharmaceutical composition of any one of embodiments 270-280, wherein Z5 represents 0 nucleosides. 282. The pharmaceutical composition of any one of embodiments 270-280, wherein Z5 represents 3 nucleosides. 283. The pharmaceutical composition of embodiment 282, wherein Z5 comprises UUU, UUC, UUA, UUG, CUU, CUC, CUA, CUG, AUU, AUC, AUA, AUG, GUU, GUC, GUA, GUG, UCU, UCC, UCA, UCG, CCU, CCC, CCA, CCG, ACU, ACC, ACA, ACG, GCU, GCC, GCA, GCG, UAU, UAC, UAA, UAG, CAU, CAC, CAA, CAG, AAU, AAC, AAA, AAG, GAU, GAC, GAA, GAG, UGU, UGC, UGA, UGG, CGU, CGC, CGA, CGG, AGU, AGC, AGA, AGG, GGU, GGC, GGA, or GGG. 284. The pharmaceutical composition of any one of embodiments 270-283, wherein one or more of the Z5 nucleosides comprise a deoxyribose. 285. The pharmaceutical composition of embodiment 284, wherein the one or more is one. 286. The pharmaceutical composition of embodiment 284, wherein the one or more is two. 287. The pharmaceutical composition of embodiment 284, wherein the one or more is three. 288. The pharmaceutical composition of any one of embodiments 270-287, comprising the lipid. 289. The pharmaceutical composition of any one of embodiments 288, wherein the lipid comprises cholesterol, myristoyl, palmitoyl, stearoyl, lithocholoyl, docosanoyl, docosahexaenoyl, myristyl, palmityl stearyl, or α-tocopherol, or a combination thereof. 290. The pharmaceutical composition of any one of embodiments 270-289, wherein Z1-U-Z2-G-Z3-U-C-Z4 comprises UGGUGUCGAGAGAUCACU (SEQ ID NO: 6011), or a nucleic acid sequence thereof having about 1 or 2 nucleoside substitutions, additions, or deletions. 291. The pharmaceutical composition of any one of embodiments 270-289, wherein Z1-U-Z2-G-Z3-U-C-Z4 comprises UCGAGAGAUCACUGAAAU (SEQ ID NO: 6012), or a nucleic acid sequence thereof having about 1 or 2 nucleoside substitutions, additions, or deletions. 292. The pharmaceutical composition of any one of embodiments 270-289, wherein Z1-U-Z2-G-Z3-U-C-Z4 comprises CAGGUUUGCCACUUUGUC (SEQ ID NO: 6013), or a nucleic acid sequence thereof having about 1 or 2 nucleoside substitutions, additions, or deletions. 293. The pharmaceutical composition of any one of embodiments 270-289, wherein Z1-U-Z2-G-Z3-U-C-Z4 comprises GCACCUUUUCAUGGUCUC (SEQ ID NO: 6014), or a nucleic acid sequence thereof having about 1 or 2 nucleoside substitutions, additions, or deletions. 294. The pharmaceutical composition of any one of embodiments 270-289, wherein Z1-U-Z2-G-Z3-U-C-Z4 comprises AGCUGGAGCCUUCCUAAC (SEQ ID NO: 15), or a nucleic acid sequence thereof having about 1 or 2 nucleoside substitutions, additions, or deletions. 295. The pharmaceutical composition of any one of embodiments 270-289, wherein the sense strand comprises mUsmGsmGmUfGmUfCfGfAmGmAmGmAmUmCmAmCmUmAsmUsmU (SEQ ID NO: 5558), or a nucleic acid sequence thereof having about 1 or 2 nucleoside substitutions, additions, or deletions; wherein “fN” is a 2′ fluoro-modified nucleoside, “mN” is a 2′ O-methyl modified nucleoside, “-” is a phosphodiester, and “s” is a phosphorothioate. 296. The pharmaceutical composition of any one of embodiments 270-289, wherein the sense strand comprises mUsmCsmGmAfGmAfGfAfUmCmAmCmUmGmAmAmAmUmAsmUsmU (SEQ ID NO: 5560), or a nucleic acid sequence thereof having about 1 or 2 nucleoside substitutions, additions, or deletions; wherein “fN” is a 2′ fluoro-modified nucleoside, “mN” is a 2′ O-methyl modified nucleoside, “-” is a phosphodiester, and “s” is a phosphorothioate. 297. The pharmaceutical composition of any one of embodiments 270-289, wherein the sense strand comprises mCsmAsmGmGfUmUfUfGfCmCmAmCmUmUmUmGmUmCmAsmUsmU (SEQ ID NO: 5562), or a nucleic acid sequence thereof having about 1 or 2 nucleoside substitutions, additions, or deletions; wherein “fN” is a 2′ fluoro-modified nucleoside, “mN” is a 2′ O-methyl modified nucleoside, “-” is a phosphodiester, and “s” is a phosphorothioate. 298. The pharmaceutical composition of any one of embodiments 270-289, wherein the sense strand comprises mGsmCsmAmCfCmUfUfUfUmCmAmUmGmGmUmCmUmCmAsmUsmU (SEQ ID NO: 5564), or a nucleic acid sequence thereof having about 1 or 2 nucleoside substitutions, additions, or deletions; wherein “fN” is a 2′ fluoro-modified nucleoside, “mN” is a 2′ O-methyl modified nucleoside, “-” is a phosphodiester, and “s” is a phosphorothioate. 299. The pharmaceutical composition of any one of embodiments 270-289, wherein the sense strand comprises mAsmGsmCmUfGmGfAfGfCmCmUmUmCmCmUmAmAmCmAsmUsmU (SEQ ID NO: 5566), or a nucleic acid sequence thereof having about 1 or 2 nucleoside substitutions, additions, or deletions; wherein “fN” is a 2′ fluoro-modified nucleoside, “mN” is a 2′ O-methyl modified nucleoside, “-” is a phosphodiester, and “s” is a phosphorothioate. 300. The pharmaceutical composition of any one of embodiments 270-299, wherein the Z1-U-Z2-G-Z3-U-C-Z4-A-U-U sequence of Formula 1A is twenty-one nucleosides in length. 301. The pharmaceutical composition of any one of embodiments 270-300, wherein the antisense strand comprises the reserve complement of Z1-U-Z2-G-Z3-U-C-Z4.

[0311] 302. The pharmaceutical composition of any one of embodiments 1-301, wherein the antisense strand comprises Formula IB: 5′ U-Z6-G-A-Z7-C-Z8-A-Z9-U-U 3′ wherein Z6 represents 0, 2, 3, 5, 8, or 11 nucleosides; Z7 represents 0, 2, 5, 8, or 10 nucleosides; Z8 represents 1 nucleoside; Z9 represents 0, 3, 5, 11, or 13 nucleosides; and each “-” is independently a phosphodiester or modified internucleoside linkage. 303. The pharmaceutical composition of embodiment 302, wherein Z6 is 0 nucleosides. 304. The pharmaceutical composition of embodiment 302, wherein Z6 is 0, 2, 3, 5, 8, or 11 nucleosides. 305. The pharmaceutical composition of embodiment 304, wherein Z6 comprises AGU, AGUGAUCUCUC (SEQ ID NO: 6016), AUUUCAGU, GA, or GUUAG, or a nucleic acid sequence thereof having about 1 or 2 nucleoside substitutions, additions, or deletions. 306. The pharmaceutical composition of any one of embodiments 302-305, wherein Z7 is 0 nucleosides. 307. The pharmaceutical composition of any one of embodiments 302-305, wherein Z7 is 0, 2, 5, 8, or 10 nucleosides. 308. The pharmaceutical composition of embodiment 307, wherein Z7 comprises UCUCU, CA, UCUCU, CAAAGUGG, GA, or AGGCU, or a nucleic acid sequence thereof having about 1 or 2 nucleoside substitutions, additions, or deletions. 309. The pharmaceutical composition of any one of embodiments 302-308, wherein Z8 comprises C, G, or A. 310. The pharmaceutical composition of any one of embodiments 302-309, wherein Z9 is 0 nucleosides. 311. The pharmaceutical composition of any one of embodiments 302-309, wherein Z9 is 3, 5, 11, or 13 nucleosides. 312. The pharmaceutical composition of embodiment 311, wherein Z9 comprises CACCA, AGUGGCAAACCUG (SEQ ID NO: 6017), ACCUG, UGAAAAGGUGC (SEQ ID NO: 6018), or GCU, or a nucleic acid sequence thereof having about 1 or 2 nucleoside substitutions, additions, or deletions. 313. The pharmaceutical composition of any one of embodiments 302-312, wherein Z6-G-A-Z7-C-Z8-A-Z9 comprises AGUGAUCUCUCGACACCA (SEQ ID NO: 6019), or a nucleic acid sequence thereof having about 1 or 2 nucleoside substitutions, additions, or deletions. 314. The pharmaceutical composition of any one of embodiments 302-312, wherein Z6-G-A-Z7-C-Z8-A-Z9 comprises AUUUCAGUGAUCUCUCGA (SEQ ID NO: 6020), or a nucleic acid sequence thereof having about 1 or 2 nucleoside substitutions, additions, or deletions. 315. The pharmaceutical composition of any one of embodiments 302-312, wherein Z6-G-A-Z7-C-Z8-A-Z9 comprises GACAAAGUGGCAAACCUG (SEQ ID NO: 6021), or a nucleic acid sequence thereof having about 1 or 2 nucleoside substitutions, additions, or deletions. 316. The pharmaceutical composition of any one of embodiments 302-312, wherein Z6-G-A-Z7-C-Z8-A-Z9 comprises GAGACCAUGAAAAGGUGC (SEQ ID NO: 6022), or a nucleic acid sequence thereof having about 1 or 2 nucleoside substitutions, additions, or deletions. 317. The pharmaceutical composition of any one of embodiments 302-312, wherein Z6-G-A-Z7-C-Z8-A-Z9 comprises GUUAGGAAGGCUCCAGCU (SEQ ID NO: 6023), or a nucleic acid sequence thereof having about 1 or 2 nucleoside substitutions, additions, or deletions. 318. The pharmaceutical composition of any one of embodiments 302-312, wherein the antisense strand comprises mUsfAsmGmUmGfAmUmCmUmCmUmCmGfAmCfAmCmCmAsmUsmU (SEQ ID NO: 5559), or a nucleic acid sequence thereof having about 1 or 2 nucleoside substitutions, additions, or deletions; wherein “fN” is a 2′ fluoro-modified nucleoside, “mN” is a 2′ O-methyl modified nucleoside, “-” is a phosphodiester, and “s” is a phosphorothioate. 319. The pharmaceutical composition of any one of embodiments 302-312, wherein the antisense strand comprises mUsfAsmUmUmUfCmAmGmUmGmAmUmCfUmCfUmCmGmAsmUsmU (SEQ ID NO: 5561), or a nucleic acid sequence thereof having about 1 or 2 nucleoside substitutions, additions, or deletions; wherein “fN” is a 2′ fluoro-modified nucleoside, “mN” is a 2′ O-methyl modified nucleoside, “-” is a phosphodiester, and “s” is a phosphorothioate. 320. The pharmaceutical composition of any one of embodiments 302-312, wherein the antisense strand comprises mUsfGsmAmCmAfAmAmGmUmGmGmCmAfAmAfCmCmUmGsmUsmU (SEQ ID NO: 5563), or a nucleic acid sequence thereof having about 1 or 2 nucleoside substitutions, additions, or deletions; wherein “fN” is a 2′ fluoro-modified nucleoside, “mN” is a 2′ O-methyl modified nucleoside, “-” is a phosphodiester, and “s” is a phosphorothioate. 321. The pharmaceutical composition of any one of embodiments 302-312, wherein the antisense strand comprises mUsfGsmAmGmAfCmCmAmUmGmAmAmAfAmGfGmUmGmCsmUsmU (SEQ ID NO: 5565), or a nucleic acid sequence thereof having about 1 or 2 nucleoside substitutions, additions, or deletions; wherein “fN” is a 2′ fluoro-modified nucleoside, “mN” is a 2′ O-methyl modified nucleoside, “-” is a phosphodiester, and “s” is a phosphorothioate. 322. The pharmaceutical composition of any one of embodiments 302-312, wherein the antisense strand comprises mUsfGsmUmUmAfGmGmAmAmGmGmCmUfCmCfAmGmCmUsmUsmU (SEQ ID NO: 5567), or a nucleic acid sequence thereof having about 1 or 2 nucleoside substitutions, additions, or deletions; wherein “fN” is a 2′ fluoro-modified nucleoside, “mN” is a 2′ O-methyl modified nucleoside, “-” is a phosphodiester, and “s” is a phosphorothioate. 323. The pharmaceutical composition of any one of embodiments 302-323, wherein the U-Z6-G-A-Z7-C-Z8-A-Z9-U-U is 21 nucleosides in length. 324. The pharmaceutical composition of any one of embodiments 1-269, wherein the sense strand comprises UGGUGUCGAGAGAUCACUG (SEQ ID NO: 5664) or a nucleic acid sequence thereof having about 1 or 2 nucleoside substitutions, additions, or deletions; and the antisense strand comprises CAGUGAUCUCUCGACACCA (SEQ ID NO: 5765) or a nucleic acid sequence thereof having about 1 or 2 nucleoside substitutions, additions, or deletions. 325. The pharmaceutical composition of any one of embodiments 1-269, wherein the sense strand comprises UGGUGUCGAGAGAUCACUA (SEQ ID NO: 5866) or a nucleic acid sequence thereof having about 1 or 2 nucleoside substitutions, additions, or deletions; and the antisense strand comprises UAGUGAUCUCUCGACACCA (SEQ ID NO: 5967) or a nucleic acid sequence thereof having about 1 or 2 nucleoside substitutions, additions, or deletions. 326. The pharmaceutical composition of any one of embodiments 1-269, wherein the sense strand comprises mUsmGsmGmUfGmUfCfGfAmGmAmGmAmUmCmAmCmUmAsmUsmU (SEQ ID NO: 5558) or a nucleic acid sequence thereof having about 1 or 2 nucleoside substitutions, additions, or deletions; and the antisense strand comprises mUsfAsmGmUmGfAmUmCmUmCmUmCmGfAmCfAmCmCmAsmUsmU (SEQ ID NO: 5559) or a nucleic acid sequence thereof having about 1 or 2 nucleoside substitutions, additions, or deletions. 327. The pharmaceutical composition of any one of embodiments 1-269, wherein the sense strand comprises UCGAGAGAUCACUGAAAUC (SEQ ID NO: 5665) or a nucleic acid sequence thereof having about 1 or 2 nucleoside substitutions, additions, or deletions; and the antisense strand comprises GAUUUCAGUGAUCUCUCGA (SEQ ID NO: 5766) or a nucleic acid sequence thereof having about 1 or 2 nucleoside substitutions, additions, or deletions. 328. The pharmaceutical composition of any one of embodiments 1-269, wherein the sense strand comprises UCGAGAGAUCACUGAAAUA (SEQ ID NO: 5867) or a nucleic acid sequence thereof having about 1 or 2 nucleoside substitutions, additions, or deletions; and the antisense strand comprises UAUUUCAGUGAUCUCUCGA (SEQ ID NO: 5968) or a nucleic acid sequence thereof having about 1 or 2 nucleoside substitutions, additions, or deletions. 329. The pharmaceutical composition of any one of embodiments 1-269, wherein the sense strand comprises mUsmCsmGmAfGmAfGfAfUmCmAmCmUmGmAmAmAmUmAsmUsmU (SEQ ID NO: 5560) or a nucleic acid sequence thereof having about 1 or 2 nucleoside substitutions, additions, or deletions; and the antisense strand comprises mUsfAsmUmUmUfCmAmGmUmGmAmUmCfUmCfUmCmGmAsmUsmU (SEQ ID NO: 5561) or a nucleic acid sequence thereof having about 1 or 2 nucleoside substitutions, additions, or deletions. 330. The pharmaceutical composition of any one of embodiments 1-269, wherein the sense strand comprises CAGGUUUGCCACUUUGUCA (SEQ ID NO: 5868) or a nucleic acid sequence thereof having about 1 or 2 nucleoside substitutions, additions, or deletions; and the antisense strand comprises UGACAAAGUGGCAAACCUG (SEQ ID NO: 5969) or a nucleic acid sequence thereof having about 1 or 2 nucleoside substitutions, additions, or deletions.

[0312] 331. The pharmaceutical composition of any one of embodiments 1-269, wherein the sense strand comprises CAGGUUUGCCACUUUGUCA (SEQ ID NO: 5868) or a nucleic acid sequence thereof having about 1 or 2 nucleoside substitutions, additions, or deletions; and the antisense strand comprises UGACAAAGUGGCAAACCUG (SEQ ID NO: 5969) or a nucleic acid sequence thereof having about 1 or 2 nucleoside substitutions, additions, or deletions. 332. The pharmaceutical composition of any one of embodiments 1-269, wherein the sense strand comprises mCsmAsmGmGfUmUfUfGfCmCmAmCmUmUmUmGmUmCmAsmUsmU (SEQ ID NO: 5562) or a nucleic acid sequence thereof having about 1 or 2 nucleoside substitutions, additions, or deletions; and the antisense strand comprises mUsfGsmAmCmAfAmAmGmUmGmGmCmAfAmAfCmCmUmGsmUsmU (SEQ ID NO: 5563) or a nucleic acid sequence thereof having about 1 or 2 nucleoside substitutions, additions, or deletions. 333. The pharmaceutical composition of any one of embodiments 1-269, wherein the sense strand comprises GCACCUUUUCAUGGUCUCU (SEQ ID NO: 5667) or a nucleic acid sequence thereof having about 1 or 2 nucleoside substitutions, additions, or deletions; and the antisense strand comprises AGAGACCAUGAAAAGGUGC (SEQ ID NO: 5768) or a nucleic acid sequence thereof having about 1 or 2 nucleoside substitutions, additions, or deletions. 334. The pharmaceutical composition of any one of embodiments 1-269, wherein the sense strand comprises GCACCUUUUCAUGGUCUCA (SEQ ID NO: 5869) or a nucleic acid sequence thereof having about 1 or 2 nucleoside substitutions, additions, or deletions; and the antisense strand comprises UGAGACCAUGAAAAGGUGC (SEQ ID NO: 5970) or a nucleic acid sequence thereof having about 1 or 2 nucleoside substitutions, additions, or deletions. 335. The pharmaceutical composition of any one of embodiments 1-269, wherein the sense strand comprises mGsmCsmAmCfCmUfUfUfUmCmAmUmGmGmUmCmUmCmAsmUsmU (SEQ ID NO: 5564) or a nucleic acid sequence thereof having about 1 or 2 nucleoside substitutions, additions, or deletions; and the antisense strand comprises mUsfGsmAmGmAfCmCmAmUmGmAmAmAfAmGfGmUmGmCsmUsmU (SEQ ID NO: 5565) or a nucleic acid sequence thereof having about 1 or 2 nucleoside substitutions, additions, or deletions. 336. The pharmaceutical composition of any one of embodiments 1-269, wherein the sense strand comprises AGCUGGAGCCUUCCUAACC (SEQ ID NO: 5668) or a nucleic acid sequence thereof having about 1 or 2 nucleoside substitutions, additions, or deletions; and the antisense strand comprises GGUUAGGAAGGCUCCAGCU (SEQ ID NO: 5769) or a nucleic acid sequence thereof having about 1 or 2 nucleoside substitutions, additions, or deletions. 337. The pharmaceutical composition of any one of embodiments 1-269, wherein the sense strand comprises AGCUGGAGCCUUCCUAACA (SEQ ID NO: 5870) or a nucleic acid sequence thereof having about 1 or 2 nucleoside substitutions, additions, or deletions; and the antisense strand comprises UGUUAGGAAGGCUCCAGCU (SEQ ID NO: 5971) or a nucleic acid sequence thereof having about 1 or 2 nucleoside substitutions, additions, or deletions. 338. The pharmaceutical composition of any one of embodiments 1-269, wherein the sense strand comprises mAsmGsmCmUfGmGfAfGfCmCmUmUmCmCmUmAmAmCmAsmUsmU (SEQ ID NO: 5566) or a nucleic acid sequence thereof having about 1 or 2 nucleoside substitutions, additions, or deletions; and the antisense strand comprises mUsfGsmUmUmAfGmGmAmAmGmGmCmUfCmCfAmGmCmUsmUsmU (SEQ ID NO: 5567) or a nucleic acid sequence thereof having about 1 or 2 nucleoside substitutions, additions, or deletions. 339. The pharmaceutical composition of any one of embodiments 1-269, wherein the sense strand comprises SEQ ID NO: 23, the first 19 nucleobases of SEQ ID NO: 23, or a nucleic acid sequence thereof having about 1 or 2 nucleoside substitutions, additions, or deletions, and the antisense strand comprises SEQ ID NO: 24, the first 19 nucleobases of SEQ ID NO: 24, or a nucleic acid sequence thereof having about 1 or 2 nucleoside substitutions, additions, or deletions; or the sense strand comprises SEQ ID NO: 5366 or a nucleic acid sequence thereof having about 1 or 2 nucleoside substitutions, additions, or deletions, and the antisense strand comprises SEQ ID NO: 5367 or a nucleic acid sequence thereof having about 1 or 2 nucleoside substitutions, additions, or deletions. 340. The pharmaceutical composition of any one of embodiments 1-269, wherein the sense strand comprises SEQ ID NO: 31, the first 19 nucleobases of SEQ ID NO: 31, or a nucleic acid sequence thereof having about 1 or 2 nucleoside substitutions, additions, or deletions, and the antisense strand comprises SEQ ID NO: 32, the first 19 nucleobases of SEQ ID NO: 32, or a nucleic acid sequence thereof having about 1 or 2 nucleoside substitutions, additions, or deletions; or the sense strand comprises SEQ ID NO: 5368 or a nucleic acid sequence thereof having about 1 or 2 nucleoside substitutions, additions, or deletions, and the antisense strand comprises SEQ ID NO: 5369 or a nucleic acid sequence thereof having about 1 or 2 nucleoside substitutions, additions, or deletions. 341. The pharmaceutical composition of any one of embodiments 1-269, wherein the sense strand comprises SEQ ID NO: 33, the first 19 nucleobases of SEQ ID NO: 33, or a nucleic acid sequence thereof having about 1 or 2 nucleoside substitutions, additions, or deletions, and the antisense strand comprises SEQ ID NO: 34, the first 19 nucleobases of SEQ ID NO: 34, or a nucleic acid sequence thereof having about 1 or 2 nucleoside substitutions, additions, or deletions; or the sense strand comprises SEQ ID NO: 5370 or a nucleic acid sequence thereof having about 1 or 2 nucleoside substitutions, additions, or deletions, and the antisense strand comprises SEQ ID NO: 5371 or a nucleic acid sequence thereof having about 1 or 2 nucleoside substitutions, additions, or deletions. 342. The pharmaceutical composition of any one of embodiments 1-269, wherein the sense strand comprises SEQ ID NO: 37, the first 19 nucleobases of SEQ ID NO: 37, or a nucleic acid sequence thereof having about 1 or 2 nucleoside substitutions, additions, or deletions, and the antisense strand comprises SEQ ID NO: 38, the first 19 nucleobases of SEQ ID NO: 38, or a nucleic acid sequence thereof having about 1 or 2 nucleoside substitutions, additions, or deletions; or the sense strand comprises SEQ ID NO: 5372 or a nucleic acid sequence thereof having about 1 or 2 nucleoside substitutions, additions, or deletions, and the antisense strand comprises SEQ ID NO: 5373 or a nucleic acid sequence thereof having about 1 or 2 nucleoside substitutions, additions, or deletions. 343. The pharmaceutical composition of any one of embodiments 1-269, wherein the sense strand comprises SEQ ID NO: 39, the first 19 nucleobases of SEQ ID NO: 39, or a nucleic acid sequence thereof having about 1 or 2 nucleoside substitutions, additions, or deletions, and the antisense strand comprises SEQ ID NO: 40, the first 19 nucleobases of SEQ ID NO: 40, or a nucleic acid sequence thereof having about 1 or 2 nucleoside substitutions, additions, or deletions; or the sense strand comprises SEQ ID NO: 5374 or a nucleic acid sequence thereof having about 1 or 2 nucleoside substitutions, additions, or deletions, and the antisense strand comprises SEQ ID NO: 5375 or a nucleic acid sequence thereof having about 1 or 2 nucleoside substitutions, additions, or deletions. 344. The pharmaceutical composition of any one of embodiments 1-269, wherein the sense strand comprises SEQ ID NO: 41, the first 19 nucleobases of SEQ ID NO: 41, or a nucleic acid sequence thereof having about 1 or 2 nucleoside substitutions, additions, or deletions, and the antisense strand comprises SEQ ID NO: 42, the first 19 nucleobases of SEQ ID NO: 42, or a nucleic acid sequence thereof having about 1 or 2 nucleoside substitutions, additions, or deletions; or the sense strand comprises SEQ ID NO: 5376 or a nucleic acid sequence thereof having about 1 or 2 nucleoside substitutions, additions, or deletions, and the antisense strand comprises SEQ ID NO: 5377 or a nucleic acid sequence thereof having about 1 or 2 nucleoside substitutions, additions, or deletions. 345. The pharmaceutical composition of any one of embodiments 1-269, wherein the sense strand comprises SEQ ID NO: 43, the first 19 nucleobases of SEQ ID NO: 43, or a nucleic acid sequence thereof having about 1 or 2 nucleoside substitutions, additions, or deletions, and the antisense strand comprises SEQ ID NO: 44, the first 19 nucleobases of SEQ ID NO: 44, or a nucleic acid sequence thereof having about 1 or 2 nucleoside substitutions, additions, or deletions; or the sense strand comprises SEQ ID NO: 5378 or a nucleic acid sequence thereof having about 1 or 2 nucleoside substitutions, additions, or deletions, and the antisense strand comprises SEQ ID NO: 5379 or a nucleic acid sequence thereof having about 1 or 2 nucleoside substitutions, additions, or deletions. 346. The pharmaceutical composition of any one of embodiments 1-269, wherein the sense strand comprises SEQ ID NO: 51, the first 19 nucleobases of SEQ ID NO: 51, or a nucleic acid sequence thereof having about 1 or 2 nucleoside substitutions, additions, or deletions, and the antisense strand comprises SEQ ID NO: 52, the first 19 nucleobases of SEQ ID NO: 52, or a nucleic acid sequence thereof having about 1 or 2 nucleoside substitutions, additions, or deletions; or the sense strand comprises SEQ ID NO: 5380 or a nucleic acid sequence thereof having about 1 or 2 nucleoside substitutions, additions, or deletions, and the antisense strand comprises SEQ ID NO: 5381 or a nucleic acid sequence thereof having about 1 or 2 nucleoside substitutions, additions, or deletions. 347. The pharmaceutical composition of any one of embodiments 1-269, wherein the sense strand comprises SEQ ID NO: 195, the first 19 nucleobases of SEQ ID NO: 195, or a nucleic acid sequence thereof having about 1 or 2 nucleoside substitutions, additions, or deletions, and the antisense strand comprises SEQ ID NO: 196, the first 19 nucleobases of SEQ ID NO: 196, or a nucleic acid sequence thereof having about 1 or 2 nucleoside substitutions, additions, or deletions; or the sense strand comprises SEQ ID NO: 5382 or a nucleic acid sequence thereof having about 1 or 2 nucleoside substitutions, additions, or deletions, and the antisense strand comprises SEQ ID NO: 5383 or a nucleic acid sequence thereof having about 1 or 2 nucleoside substitutions, additions, or deletions. 348. The pharmaceutical composition of any one of embodiments 1-269, wherein the sense strand comprises SEQ ID NO: 197, the first 19 nucleobases of SEQ ID NO: 197, or a nucleic acid sequence thereof having about 1 or 2 nucleoside substitutions, additions, or deletions, and the antisense strand comprises SEQ ID NO: 198, the first 19 nucleobases of SEQ ID NO: 198, or a nucleic acid sequence thereof having about 1 or 2 nucleoside substitutions, additions, or deletions; or the sense strand comprises SEQ ID NO: 5384 or a nucleic acid sequence thereof having about 1 or 2 nucleoside substitutions, additions, or deletions, and the antisense strand comprises SEQ ID NO: 5385 or a nucleic acid sequence thereof having about 1 or 2 nucleoside substitutions, additions, or deletions. 349. The pharmaceutical composition of any one of embodiments 1-269, wherein the sense strand comprises SEQ ID NO: 199, the first 19 nucleobases of SEQ ID NO: 199, or a nucleic acid sequence thereof having about 1 or 2 nucleoside substitutions, additions, or deletions, and the antisense strand comprises SEQ ID NO: 200, the first 19 nucleobases of SEQ ID NO: 200, or a nucleic acid sequence thereof having about 1 or 2 nucleoside substitutions, additions, or deletions; or the sense strand comprises SEQ ID NO: 5386 or a nucleic acid sequence thereof having about 1 or 2 nucleoside substitutions, additions, or deletions, and the antisense strand comprises SEQ ID NO: 5387 or a nucleic acid sequence thereof having about 1 or 2 nucleoside substitutions, additions, or deletions. 350. The pharmaceutical composition of any one of embodiments 1-269, wherein the sense strand comprises SEQ ID NO: 251, the first 19 nucleobases of SEQ ID NO: 251, or a nucleic acid sequence thereof having about 1 or 2 nucleoside substitutions, additions, or deletions, and the antisense strand comprises SEQ ID NO: 252, the first 19 nucleobases of SEQ ID NO: 252, or a nucleic acid sequence thereof having about 1 or 2 nucleoside substitutions, additions, or deletions; or the sense strand comprises SEQ ID NO: 5388 or a nucleic acid sequence thereof having about 1 or 2 nucleoside substitutions, additions, or deletions, and the antisense strand comprises SEQ ID NO: 5389 or a nucleic acid sequence thereof having about 1 or 2 nucleoside substitutions, additions, or deletions. 351. The pharmaceutical composition of any one of embodiments 1-269, wherein the sense strand comprises SEQ ID NO: 257, the first 19 nucleobases of SEQ ID NO: 257, or a nucleic acid sequence thereof having about 1 or 2 nucleoside substitutions, additions, or deletions, and the antisense strand comprises SEQ ID NO: 258, the first 19 nucleobases of SEQ ID NO: 258, or a nucleic acid sequence thereof having about 1 or 2 nucleoside substitutions, additions, or deletions; or the sense strand comprises SEQ ID NO: 5390 or a nucleic acid sequence thereof having about 1 or 2 nucleoside substitutions, additions, or deletions, and the antisense strand comprises SEQ ID NO: 5391 or a nucleic acid sequence thereof having about 1 or 2 nucleoside substitutions, additions, or deletions. 352. The pharmaceutical composition of any one of embodiments 1-269, wherein the sense strand comprises SEQ ID NO: 263, the first 19 nucleobases of SEQ ID NO: 263, or a nucleic acid sequence thereof having about 1 or 2 nucleoside substitutions, additions, or deletions, and the antisense strand comprises SEQ ID NO: 264, the first 19 nucleobases of SEQ ID NO: 264, or a nucleic acid sequence thereof having about 1 or 2 nucleoside substitutions, additions, or deletions; or the sense strand comprises SEQ ID NO: 5392 or a nucleic acid sequence thereof having about 1 or 2 nucleoside substitutions, additions, or deletions, and the antisense strand comprises SEQ ID NO: 5393 or a nucleic acid sequence thereof having about 1 or 2 nucleoside substitutions, additions, or deletions. 353. The pharmaceutical composition of any one of embodiments 1-269, wherein the sense strand comprises SEQ ID NO: 273, the first 19 nucleobases of SEQ ID NO: 273, or a nucleic acid sequence thereof having about 1 or 2 nucleoside substitutions, additions, or deletions, and the antisense strand comprises SEQ ID NO: 274, the first 19 nucleobases of SEQ ID NO: 274, or a nucleic acid sequence thereof having about 1 or 2 nucleoside substitutions, additions, or deletions; or the sense strand comprises SEQ ID NO: 5394 or a nucleic acid sequence thereof having about 1 or 2 nucleoside substitutions, additions, or deletions, and the antisense strand comprises SEQ ID NO: 5395 or a nucleic acid sequence thereof having about 1 or 2 nucleoside substitutions, additions, or deletions. 354. The pharmaceutical composition of any one of embodiments 1-269, wherein the sense strand comprises SEQ ID NO: 275, the first 19 nucleobases of SEQ ID NO: 275, or a nucleic acid sequence thereof having about 1 or 2 nucleoside substitutions, additions, or deletions, and the antisense strand comprises SEQ ID NO: 276, the first 19 nucleobases of SEQ ID NO: 276, or a nucleic acid sequence thereof having about 1 or 2 nucleoside substitutions, additions, or deletions; or the sense strand comprises SEQ ID NO: 5396 or a nucleic acid sequence thereof having about 1 or 2 nucleoside substitutions, additions, or deletions, and the antisense strand comprises SEQ ID NO: 5397 or a nucleic acid sequence thereof having about 1 or 2 nucleoside substitutions, additions, or deletions. 355. The pharmaceutical composition of any one of embodiments 1-269, wherein the sense strand comprises SEQ ID NO: 279, the first 19 nucleobases of SEQ ID NO: 279, or a nucleic acid sequence thereof having about 1 or 2 nucleoside substitutions, additions, or deletions, and the antisense strand comprises SEQ ID NO: 280, the first 19 nucleobases of SEQ ID NO: 280, or a nucleic acid sequence thereof having about 1 or 2 nucleoside substitutions, additions, or deletions; or the sense strand comprises SEQ ID NO: 5398 or a nucleic acid sequence thereof having about 1 or 2 nucleoside substitutions, additions, or deletions, and the antisense strand comprises SEQ ID NO: 5399 or a nucleic acid sequence thereof having about 1 or 2 nucleoside substitutions, additions, or deletions. 356. The pharmaceutical composition of any one of embodiments 1-269, wherein the sense strand comprises SEQ ID NO: 2389, the first 19 nucleobases of SEQ ID NO: 2389, or a nucleic acid sequence thereof having about 1 or 2 nucleoside substitutions, additions, or deletions, and the antisense strand comprises SEQ ID NO: 2390, the first 19 nucleobases of SEQ ID NO: 2390, or a nucleic acid sequence thereof having about 1 or 2 nucleoside substitutions, additions, or deletions; or the sense strand comprises SEQ ID NO: 5400 or a nucleic acid sequence thereof having about 1 or 2 nucleoside substitutions, additions, or deletions, and the antisense strand comprises SEQ ID NO: 5401 or a nucleic acid sequence thereof having about 1 or 2 nucleoside substitutions, additions, or deletions. 357. The pharmaceutical composition of any one of embodiments 1-269, wherein the sense strand comprises SEQ ID NO: 2391, the first 19 nucleobases of SEQ ID NO: 2391, or a nucleic acid sequence thereof having about 1 or 2 nucleoside substitutions, additions, or deletions, and the antisense strand comprises SEQ ID NO: 2392, the first 19 nucleobases of SEQ ID NO: 2392, or a nucleic acid sequence thereof having about 1 or 2 nucleoside substitutions, additions, or deletions; or the sense strand comprises SEQ ID NO: 5402 or a nucleic acid sequence thereof having about 1 or 2 nucleoside substitutions, additions, or deletions, and the antisense strand comprises SEQ ID NO: 5403 or a nucleic acid sequence thereof having about 1 or 2 nucleoside substitutions, additions, or deletions. 358. The pharmaceutical composition of any one of embodiments 1-269, wherein the sense strand comprises SEQ ID NO: 2397, the first 19 nucleobases of SEQ ID NO: 2397, or a nucleic acid sequence thereof having about 1 or 2 nucleoside substitutions, additions, or deletions, and the antisense strand comprises SEQ ID NO: 2398, the first 19 nucleobases of SEQ ID NO: 2398, or a nucleic acid sequence thereof having about 1 or 2 nucleoside substitutions, additions, or deletions; or the sense strand comprises SEQ ID NO: 5404 or a nucleic acid sequence thereof having about 1 or 2 nucleoside substitutions, additions, or deletions, and the antisense strand comprises SEQ ID NO: 5405 or a nucleic acid sequence thereof having about 1 or 2 nucleoside substitutions, additions, or deletions. 359. The pharmaceutical composition of any one of embodiments 1-269, wherein the sense strand comprises SEQ ID NO: 2399, the first 19 nucleobases of SEQ ID NO: 2399, or a nucleic acid sequence thereof having about 1 or 2 nucleoside substitutions, additions, or deletions, and the antisense strand comprises SEQ ID NO: 2400, the first 19 nucleobases of SEQ ID NO: 2400, or a nucleic acid sequence thereof having about 1 or 2 nucleoside substitutions, additions, or deletions; or the sense strand comprises SEQ ID NO: 5406 or a nucleic acid sequence thereof having about 1 or 2 nucleoside substitutions, additions, or deletions, and the antisense strand comprises SEQ ID NO: 5407 or a nucleic acid sequence thereof having about 1 or 2 nucleoside substitutions, additions, or deletions. 360. The pharmaceutical composition of any one of embodiments 1-269, wherein the sense strand comprises SEQ ID NO: 2409, the first 19 nucleobases of SEQ ID NO: 2409, or a nucleic acid sequence thereof having about 1 or 2 nucleoside substitutions, additions, or deletions, and the antisense strand comprises SEQ ID NO: 2410, the first 19 nucleobases of SEQ ID NO: 2410, or a nucleic acid sequence thereof having about 1 or 2 nucleoside substitutions, additions, or deletions; or the sense strand comprises SEQ ID NO: 5408 or a nucleic acid sequence thereof having about 1 or 2 nucleoside substitutions, additions, or deletions, and the antisense strand comprises SEQ ID NO: 5409 or a nucleic acid sequence thereof having about 1 or 2 nucleoside substitutions, additions, or deletions. 361. The pharmaceutical composition of any one of embodiments 1-269, wherein the sense strand comprises SEQ ID NO: 2415, the first 19 nucleobases of SEQ ID NO: 2415, or a nucleic acid sequence thereof having about 1 or 2 nucleoside substitutions, additions, or deletions, and the antisense strand comprises SEQ ID NO: 2416, the first 19 nucleobases of SEQ ID NO: 2416, or a nucleic acid sequence thereof having about 1 or 2 nucleoside substitutions, additions, or deletions; or the sense strand comprises SEQ ID NO: 5410 or a nucleic acid sequence thereof having about 1 or 2 nucleoside substitutions, additions, or deletions, and the antisense strand comprises SEQ ID NO: 5411 or a nucleic acid sequence thereof having about 1 or 2 nucleoside substitutions, additions, or deletions. 362. The pharmaceutical composition of any one of embodiments 1-269, wherein the sense strand comprises SEQ ID NO: 2419, the first 19 nucleobases of SEQ ID NO: 2419, or a nucleic acid sequence thereof having about 1 or 2 nucleoside substitutions, additions, or deletions, and the antisense strand comprises SEQ ID NO: 2420, the first 19 nucleobases of SEQ ID NO: 2420, or a nucleic acid sequence thereof having about 1 or 2 nucleoside substitutions, additions, or deletions; or the sense strand comprises SEQ ID NO: 5412 or a nucleic acid sequence thereof having about 1 or 2 nucleoside substitutions, additions, or deletions, and the antisense strand comprises SEQ ID NO: 5413 or a nucleic acid sequence thereof having about 1 or 2 nucleoside substitutions, additions, or deletions. 363. The pharmaceutical composition of any one of embodiments 1-269, wherein the sense strand comprises SEQ ID NO: 2421, the first 19 nucleobases of SEQ ID NO: 2421, or a nucleic acid sequence thereof having about 1 or 2 nucleoside substitutions, additions, or deletions, and the antisense strand comprises SEQ ID NO: 2422, the first 19 nucleobases of SEQ ID NO: 2422, or a nucleic acid sequence thereof having about 1 or 2 nucleoside substitutions, additions, or deletions; or the sense strand comprises SEQ ID NO: 5414 or a nucleic acid sequence thereof having about 1 or 2 nucleoside substitutions, additions, or deletions, and the antisense strand comprises SEQ ID NO: 5415 or a nucleic acid sequence thereof having about 1 or 2 nucleoside substitutions, additions, or deletions. 364. The pharmaceutical composition of any one of embodiments 1-269, wherein the sense strand comprises SEQ ID NO: 2423, the first 19 nucleobases of SEQ ID NO: 2423, or a nucleic acid sequence thereof having about 1 or 2 nucleoside substitutions, additions, or deletions, and the antisense strand comprises SEQ ID NO: 2424, the first 19 nucleobases of SEQ ID NO: 2424, or a nucleic acid sequence thereof having about 1 or 2 nucleoside substitutions, additions, or deletions; or the sense strand comprises SEQ ID NO: 5416 or a nucleic acid sequence thereof having about 1 or 2 nucleoside substitutions, additions, or deletions, and the antisense strand comprises SEQ ID NO: 5417 or a nucleic acid sequence thereof having about 1 or 2 nucleoside substitutions, additions, or deletions. 365. The pharmaceutical composition of any one of embodiments 1-269, wherein the sense strand comprises SEQ ID NO: 2425, the first 19 nucleobases of SEQ ID NO: 2425, or a nucleic acid sequence thereof having about 1 or 2 nucleoside substitutions, additions, or deletions, and the antisense strand comprises SEQ ID NO: 2426, the first 19 nucleobases of SEQ ID NO: 2426, or a nucleic acid sequence thereof having about 1 or 2 nucleoside substitutions, additions, or deletions; or the sense strand comprises SEQ ID NO: 5418 or a nucleic acid sequence thereof having about 1 or 2 nucleoside substitutions, additions, or deletions, and the antisense strand comprises SEQ ID NO: 5419 or a nucleic acid sequence thereof having about 1 or 2 nucleoside substitutions, additions, or deletions. 366. The pharmaceutical composition of any one of embodiments 1-269, wherein the sense strand comprises SEQ ID NO: 2427, the first 19 nucleobases of SEQ ID NO: 2427, or a nucleic acid sequence thereof having about 1 or 2 nucleoside substitutions, additions, or deletions, and the antisense strand comprises SEQ ID NO: 2428, the first 19 nucleobases of SEQ ID NO: 2428, or a nucleic acid sequence thereof having about 1 or 2 nucleoside substitutions, additions, or deletions; or the sense strand comprises SEQ ID NO: 5420 or a nucleic acid sequence thereof having about 1 or 2 nucleoside substitutions, additions, or deletions, and the antisense strand comprises SEQ ID NO: 5421 or a nucleic acid sequence thereof having about 1 or 2 nucleoside substitutions, additions, or deletions. 367. The pharmaceutical composition of any one of embodiments 1-269, wherein the sense strand comprises SEQ ID NO: 2431, the first 19 nucleobases of SEQ ID NO: 2431, or a nucleic acid sequence thereof having about 1 or 2 nucleoside substitutions, additions, or deletions, and the antisense strand comprises SEQ ID NO: 2432, the first 19 nucleobases of SEQ ID NO: 2432, or a nucleic acid sequence thereof having about 1 or 2 nucleoside substitutions, additions, or deletions; or the sense strand comprises SEQ ID NO: 5422 or a nucleic acid sequence thereof having about 1 or 2 nucleoside substitutions, additions, or deletions, and the antisense strand comprises SEQ ID NO: 5423 or a nucleic acid sequence thereof having about 1 or 2 nucleoside substitutions, additions, or deletions. 368. The pharmaceutical composition of any one of embodiments 1-269, wherein the sense strand comprises SEQ ID NO: 2437, the first 19 nucleobases of SEQ ID NO: 2437, or a nucleic acid sequence thereof having about 1 or 2 nucleoside substitutions, additions, or deletions, and the antisense strand comprises SEQ ID NO: 2438, the first 19 nucleobases of SEQ ID NO: 2438, or a nucleic acid sequence thereof having about 1 or 2 nucleoside substitutions, additions, or deletions; or the sense strand comprises SEQ ID NO: 5424 or a nucleic acid sequence thereof having about 1 or 2 nucleoside substitutions, additions, or deletions, and the antisense strand comprises SEQ ID NO: 5425 or a nucleic acid sequence thereof having about 1 or 2 nucleoside substitutions, additions, or deletions. 369. The pharmaceutical composition of any one of embodiments 1-269, wherein the sense strand comprises SEQ ID NO: 2439, the first 19 nucleobases of SEQ ID NO: 2439, or a nucleic acid sequence thereof having about 1 or 2 nucleoside substitutions, additions, or deletions, and the antisense strand comprises SEQ ID NO: 2440, the first 19 nucleobases of SEQ ID NO: 2440, or a nucleic acid sequence thereof having about 1 or 2 nucleoside substitutions, additions, or deletions; or the sense strand comprises SEQ ID NO: 5426 or a nucleic acid sequence thereof having about 1 or 2 nucleoside substitutions, additions, or deletions, and the antisense strand comprises SEQ ID NO: 5427 or a nucleic acid sequence thereof having about 1 or 2 nucleoside substitutions, additions, or deletions. 370. The pharmaceutical composition of any one of embodiments 1-269, wherein the sense strand comprises SEQ ID NO: 2769, the first 19 nucleobases of SEQ ID NO: 2769, or a nucleic acid sequence thereof having about 1 or 2 nucleoside substitutions, additions, or deletions, and the antisense strand comprises SEQ ID NO: 2770, the first 19 nucleobases of SEQ ID NO: 2770, or a nucleic acid sequence thereof having about 1 or 2 nucleoside substitutions, additions, or deletions; or the sense strand comprises SEQ ID NO: 5428 or a nucleic acid sequence thereof having about 1 or 2 nucleoside substitutions, additions, or deletions, and the antisense strand comprises SEQ ID NO: 5429 or a nucleic acid sequence thereof having about 1 or 2 nucleoside substitutions, additions, or deletions. 371. The pharmaceutical composition of any one of embodiments 1-269, wherein the sense strand comprises SEQ ID NO: 2771, the first 19 nucleobases of SEQ ID NO: 2771, or a nucleic acid sequence thereof having about 1 or 2 nucleoside substitutions, additions, or deletions, and the antisense strand comprises SEQ ID NO: 2772, the first 19 nucleobases of SEQ ID NO: 2772, or a nucleic acid sequence thereof having about 1 or 2 nucleoside substitutions, additions, or deletions; or the sense strand comprises SEQ ID NO: 5430 or a nucleic acid sequence thereof having about 1 or 2 nucleoside substitutions, additions, or deletions, and the antisense strand comprises SEQ ID NO: 5431 or a nucleic acid sequence thereof having about 1 or 2 nucleoside substitutions, additions, or deletions. 372. The pharmaceutical composition of any one of embodiments 1-269, wherein the sense strand comprises SEQ ID NO: 2773, the first 19 nucleobases of SEQ ID NO: 2773, or a nucleic acid sequence thereof having about 1 or 2 nucleoside substitutions, additions, or deletions, and the antisense strand comprises SEQ ID NO: 2774, the first 19 nucleobases of SEQ ID NO: 2774, or a nucleic acid sequence thereof having about 1 or 2 nucleoside substitutions, additions, or deletions; or the sense strand comprises SEQ ID NO: 5432 or a nucleic acid sequence thereof having about 1 or 2 nucleoside substitutions, additions, or deletions, and the antisense strand comprises SEQ ID NO: 5433 or a nucleic acid sequence thereof having about 1 or 2 nucleoside substitutions, additions, or deletions. 373. The pharmaceutical composition of any one of embodiments 1-269, wherein the sense strand comprises SEQ ID NO: 2881, the first 19 nucleobases of SEQ ID NO: 2881, or a nucleic acid sequence thereof having about 1 or 2 nucleoside substitutions, additions, or deletions, and the antisense strand comprises SEQ ID NO: 2882, the first 19 nucleobases of SEQ ID NO: 2882, or a nucleic acid sequence thereof having about 1 or 2 nucleoside substitutions, additions, or deletions; or the sense strand comprises SEQ ID NO: 5434 or a nucleic acid sequence thereof having about 1 or 2 nucleoside substitutions, additions, or deletions, and the antisense strand comprises SEQ ID NO: 5435 or a nucleic acid sequence thereof having about 1 or 2 nucleoside substitutions, additions, or deletions. 374. The pharmaceutical composition of any one of embodiments 1-269, wherein the sense strand comprises SEQ ID NO: 2899, the first 19 nucleobases of SEQ ID NO: 2899, or a nucleic acid sequence thereof having about 1 or 2 nucleoside substitutions, additions, or deletions, and the antisense strand comprises SEQ ID NO: 2900, the first 19 nucleobases of SEQ ID NO: 2900, or a nucleic acid sequence thereof having about 1 or 2 nucleoside substitutions, additions, or deletions; or the sense strand comprises SEQ ID NO: 5436 or a nucleic acid sequence thereof having about 1 or 2 nucleoside substitutions, additions, or deletions, and the antisense strand comprises SEQ ID NO: 5437 or a nucleic acid sequence thereof having about 1 or 2 nucleoside substitutions, additions, or deletions. 375. The pharmaceutical composition of any one of embodiments 1-269, wherein the sense strand comprises SEQ ID NO: 2903, the first 19 nucleobases of SEQ ID NO: 2903, or a nucleic acid sequence thereof having about 1 or 2 nucleoside substitutions, additions, or deletions, and the antisense strand comprises SEQ ID NO: 2904, the first 19 nucleobases of SEQ ID NO: 2904, or a nucleic acid sequence thereof having about 1 or 2 nucleoside substitutions, additions, or deletions; or the sense strand comprises SEQ ID NO: 5438 or a nucleic acid sequence thereof having about 1 or 2 nucleoside substitutions, additions, or deletions, and the antisense strand comprises SEQ ID NO: 5439 or a nucleic acid sequence thereof having about 1 or 2 nucleoside substitutions, additions, or deletions. 376. The pharmaceutical composition of any one of embodiments 1-269, wherein the sense strand comprises SEQ ID NO: 2905, the first 19 nucleobases of SEQ ID NO: 2905, or a nucleic acid sequence thereof having about 1 or 2 nucleoside substitutions, additions, or deletions, and the antisense strand comprises SEQ ID NO: 2906, the first 19 nucleobases of SEQ ID NO: 2906, or a nucleic acid sequence thereof having about 1 or 2 nucleoside substitutions, additions, or deletions; or the sense strand comprises SEQ ID NO: 5440 or a nucleic acid sequence thereof having about 1 or 2 nucleoside substitutions, additions, or deletions, and the antisense strand comprises SEQ ID NO: 5441 or a nucleic acid sequence thereof having about 1 or 2 nucleoside substitutions, additions, or deletions. 377. The pharmaceutical composition of any one of embodiments 1-269, wherein the sense strand comprises SEQ ID NO: 2909, the first 19 nucleobases of SEQ ID NO: 2909, or a nucleic acid sequence thereof having about 1 or 2 nucleoside substitutions, additions, or deletions, and the antisense strand comprises SEQ ID NO: 2910, the first 19 nucleobases of SEQ ID NO: 2910, or a nucleic acid sequence thereof having about 1 or 2 nucleoside substitutions, additions, or deletions; or the sense strand comprises SEQ ID NO: 5442 or a nucleic acid sequence thereof having about 1 or 2 nucleoside substitutions, additions, or deletions, and the antisense strand comprises SEQ ID NO: 5443 or a nucleic acid sequence thereof having about 1 or 2 nucleoside substitutions, additions, or deletions. 378. The pharmaceutical composition of any one of embodiments 1-269, wherein the sense strand comprises SEQ ID NO: 2913, the first 19 nucleobases of SEQ ID NO: 2913, or a nucleic acid sequence thereof having about 1 or 2 nucleoside substitutions, additions, or deletions, and the antisense strand comprises SEQ ID NO: 2914, the first 19 nucleobases of SEQ ID NO: 2914, or a nucleic acid sequence thereof having about 1 or 2 nucleoside substitutions, additions, or deletions; or the sense strand comprises SEQ ID NO: 5444 or a nucleic acid sequence thereof having about 1 or 2 nucleoside substitutions, additions, or deletions, and the antisense strand comprises SEQ ID NO: 5445 or a nucleic acid sequence thereof having about 1 or 2 nucleoside substitutions, additions, or deletions. 379. The pharmaceutical composition of any one of embodiments 1-269, wherein the sense strand comprises SEQ ID NO: 2915, the first 19 nucleobases of SEQ ID NO: 2915, or a nucleic acid sequence thereof having about 1 or 2 nucleoside substitutions, additions, or deletions, and the antisense strand comprises SEQ ID NO: 2916, the first 19 nucleobases of SEQ ID NO: 2916, or a nucleic acid sequence thereof having about 1 or 2 nucleoside substitutions, additions, or deletions; or the sense strand comprises SEQ ID NO: 5446 or a nucleic acid sequence thereof having about 1 or 2 nucleoside substitutions, additions, or deletions, and the antisense strand comprises SEQ ID NO: 5447 or a nucleic acid sequence thereof having about 1 or 2 nucleoside substitutions, additions, or deletions. 380. The pharmaceutical composition of any one of embodiments 1-269, wherein the sense strand comprises SEQ ID NO: 3013, the first 19 nucleobases of SEQ ID NO: 3013, or a nucleic acid sequence thereof having about 1 or 2 nucleoside substitutions, additions, or deletions, and the antisense strand comprises SEQ ID NO: 3014, the first 19 nucleobases of SEQ ID NO: 3014, or a nucleic acid sequence thereof having about 1 or 2 nucleoside substitutions, additions, or deletions; or the sense strand comprises SEQ ID NO: 5448 or a nucleic acid sequence thereof having about 1 or 2 nucleoside substitutions, additions, or deletions, and the antisense strand comprises SEQ ID NO: 5449 or a nucleic acid sequence thereof having about 1 or 2 nucleoside substitutions, additions, or deletions. 381. The pharmaceutical composition of any one of embodiments 1-269, wherein the sense strand comprises SEQ ID NO: 3015, the first 19 nucleobases of SEQ ID NO: 3015, or a nucleic acid sequence thereof having about 1 or 2 nucleoside substitutions, additions, or deletions, and the antisense strand comprises SEQ ID NO: 3016, the first 19 nucleobases of SEQ ID NO: 3016, or a nucleic acid sequence thereof having about 1 or 2 nucleoside substitutions, additions, or deletions; or the sense strand comprises SEQ ID NO: 5450 or a nucleic acid sequence thereof having about 1 or 2 nucleoside substitutions, additions, or deletions, and the antisense strand comprises SEQ ID NO: 5451 or a nucleic acid sequence thereof having about 1 or 2 nucleoside substitutions, additions, or deletions. 382. The pharmaceutical composition of any one of embodiments 1-269, wherein the sense strand comprises SEQ ID NO: 3017, the first 19 nucleobases of SEQ ID NO: 3017, or a nucleic acid sequence thereof having about 1 or 2 nucleoside substitutions, additions, or deletions, and the antisense strand comprises SEQ ID NO: 3018, the first 19 nucleobases of SEQ ID NO: 3018, or a nucleic acid sequence thereof having about 1 or 2 nucleoside substitutions, additions, or deletions; or the sense strand comprises SEQ ID NO: 5452 or a nucleic acid sequence thereof having about 1 or 2 nucleoside substitutions, additions, or deletions, and the antisense strand comprises SEQ ID NO: 5453 or a nucleic acid sequence thereof having about 1 or 2 nucleoside substitutions, additions, or deletions. 383. The pharmaceutical composition of any one of embodiments 1-269, wherein the sense strand comprises SEQ ID NO: 3019, the first 19 nucleobases of SEQ ID NO: 3019, or a nucleic acid sequence thereof having about 1 or 2 nucleoside substitutions, additions, or deletions, and the antisense strand comprises SEQ ID NO: 3020, the first 19 nucleobases of SEQ ID NO: 3020, or a nucleic acid sequence thereof having about 1 or 2 nucleoside substitutions, additions, or deletions; or the sense strand comprises SEQ ID NO: 5454 or a nucleic acid sequence thereof having about 1 or 2 nucleoside substitutions, additions, or deletions, and the antisense strand comprises SEQ ID NO: 5455 or a nucleic acid sequence thereof having about 1 or 2 nucleoside substitutions, additions, or deletions. 384. The pharmaceutical composition of any one of embodiments 1-269, wherein the sense strand comprises SEQ ID NO: 3027, the first 19 nucleobases of SEQ ID NO: 3027, or a nucleic acid sequence thereof having about 1 or 2 nucleoside substitutions, additions, or deletions, and the antisense strand comprises SEQ ID NO: 3028, the first 19 nucleobases of SEQ ID NO: 3028, or a nucleic acid sequence thereof having about 1 or 2 nucleoside substitutions, additions, or deletions; or the sense strand comprises SEQ ID NO: 5456 or a nucleic acid sequence thereof having about 1 or 2 nucleoside substitutions, additions, or deletions, and the antisense strand comprises SEQ ID NO: 5457 or a nucleic acid sequence thereof having about 1 or 2 nucleoside substitutions, additions, or deletions. 385. The pharmaceutical composition of any one of embodiments 1-269, wherein the sense strand comprises SEQ ID NO: 3029, the first 19 nucleobases of SEQ ID NO: 3029, or a nucleic acid sequence thereof having about 1 or 2 nucleoside substitutions, additions, or deletions, and the antisense strand comprises SEQ ID NO: 3030, the first 19 nucleobases of SEQ ID NO: 3030, or a nucleic acid sequence thereof having about 1 or 2 nucleoside substitutions, additions, or deletions; or the sense strand comprises SEQ ID NO: 5458 or a nucleic acid sequence thereof having about 1 or 2 nucleoside substitutions, additions, or deletions, and the antisense strand comprises SEQ ID NO: 5459 or a nucleic acid sequence thereof having about 1 or 2 nucleoside substitutions, additions, or deletions. 386. The pharmaceutical composition of any one of embodiments 1-269, wherein the sense strand comprises SEQ ID NO: 3037, the first 19 nucleobases of SEQ ID NO: 3037, or a nucleic acid sequence thereof having about 1 or 2 nucleoside substitutions, additions, or deletions, and the antisense strand comprises SEQ ID NO: 3038, the first 19 nucleobases of SEQ ID NO: 3038, or a nucleic acid sequence thereof having about 1 or 2 nucleoside substitutions, additions, or deletions; or the sense strand comprises SEQ ID NO: 5460 or a nucleic acid sequence thereof having about 1 or 2 nucleoside substitutions, additions, or deletions, and the antisense strand comprises SEQ ID NO: 5461 or a nucleic acid sequence thereof having about 1 or 2 nucleoside substitutions, additions, or deletions. 387. The pharmaceutical composition of any one of embodiments 1-269, wherein the sense strand comprises SEQ ID NO: 3039, the first 19 nucleobases of SEQ ID NO: 3039, or a nucleic acid sequence thereof having about 1 or 2 nucleoside substitutions, additions, or deletions, and the antisense strand comprises SEQ ID NO: 3040, the first 19 nucleobases of SEQ ID NO: 3040, or a nucleic acid sequence thereof having about 1 or 2 nucleoside substitutions, additions, or deletions; or the sense strand comprises SEQ ID NO: 5462 or a nucleic acid sequence thereof having about 1 or 2 nucleoside substitutions, additions, or deletions, and the antisense strand comprises SEQ ID NO: 5463 or a nucleic acid sequence thereof having about 1 or 2 nucleoside substitutions, additions, or deletions. 388. The pharmaceutical composition of any one of embodiments 1-269, wherein the sense strand comprises SEQ ID NO: 3041, the first 19 nucleobases of SEQ ID NO: 3041, or a nucleic acid sequence thereof having about 1 or 2 nucleoside substitutions, additions, or deletions, and the antisense strand comprises SEQ ID NO: 3042, the first 19 nucleobases of SEQ ID NO: 3042, or a nucleic acid sequence thereof having about 1 or 2 nucleoside substitutions, additions, or deletions; or the sense strand comprises SEQ ID NO: 5464 or a nucleic acid sequence thereof having about 1 or 2 nucleoside substitutions, additions, or deletions, and the antisense strand comprises SEQ ID NO: 5465 or a nucleic acid sequence thereof having about 1 or 2 nucleoside substitutions, additions, or deletions. 389. The pharmaceutical composition of any one of embodiments 1-269, wherein the sense strand comprises SEQ ID NO: 3047, the first 19 nucleobases of SEQ ID NO: 3047, or a nucleic acid sequence thereof having about 1 or 2 nucleoside substitutions, additions, or deletions, and the antisense strand comprises SEQ ID NO: 3048, the first 19 nucleobases of SEQ ID NO: 3048, or a nucleic acid sequence thereof having about 1 or 2 nucleoside substitutions, additions, or deletions; or the sense strand comprises SEQ ID NO: 5466 or a nucleic acid sequence thereof having about 1 or 2 nucleoside substitutions, additions, or deletions, and the antisense strand comprises SEQ ID NO: 5467 or a nucleic acid sequence thereof having about 1 or 2 nucleoside substitutions, additions, or deletions. 390. The pharmaceutical composition of any one of embodiments 1-269, wherein the sense strand comprises SEQ ID NO: 3053, the first 19 nucleobases of SEQ ID NO: 3053, or a nucleic acid sequence thereof having about 1 or 2 nucleoside substitutions, additions, or deletions, and the antisense strand comprises SEQ ID NO: 3054, the first 19 nucleobases of SEQ ID NO: 3054, or a nucleic acid sequence thereof having about 1 or 2 nucleoside substitutions, additions, or deletions; or the sense strand comprises SEQ ID NO: 5468 or a nucleic acid sequence thereof having about 1 or 2 nucleoside substitutions, additions, or deletions, and the antisense strand comprises SEQ ID NO: 5469 or a nucleic acid sequence thereof having about 1 or 2 nucleoside substitutions, additions, or deletions. 391. The pharmaceutical composition of any one of embodiments 1-269, wherein the sense strand comprises SEQ ID NO: 3055, the first 19 nucleobases of SEQ ID NO: 3055, or a nucleic acid sequence thereof having about 1 or 2 nucleoside substitutions, additions, or deletions, and the antisense strand comprises SEQ ID NO: 3056, the first 19 nucleobases of SEQ ID NO: 3056, or a nucleic acid sequence thereof having about 1 or 2 nucleoside substitutions, additions, or deletions; or the sense strand comprises SEQ ID NO: 5470 or a nucleic acid sequence thereof having about 1 or 2 nucleoside substitutions, additions, or deletions, and the antisense strand comprises SEQ ID NO: 5471 or a nucleic acid sequence thereof having about 1 or 2 nucleoside substitutions, additions, or deletions. 392. The pharmaceutical composition of any one of embodiments 1-269, wherein the sense strand comprises SEQ ID NO: 3063, the first 19 nucleobases of SEQ ID NO: 3063, or a nucleic acid sequence thereof having about 1 or 2 nucleoside substitutions, additions, or deletions, and the antisense strand comprises SEQ ID NO: 3064, the first 19 nucleobases of SEQ ID NO: 3064, or a nucleic acid sequence thereof having about 1 or 2 nucleoside substitutions, additions, or deletions; or the sense strand comprises SEQ ID NO: 5472 or a nucleic acid sequence thereof having about 1 or 2 nucleoside substitutions, additions, or deletions, and the antisense strand comprises SEQ ID NO: 5473 or a nucleic acid sequence thereof having about 1 or 2 nucleoside substitutions, additions, or deletions. 393. The pharmaceutical composition of any one of embodiments 1-269, wherein the sense strand comprises SEQ ID NO: 3065, the first 19 nucleobases of SEQ ID NO: 3065, or a nucleic acid sequence thereof having about 1 or 2 nucleoside substitutions, additions, or deletions, and the antisense strand comprises SEQ ID NO: 3066, the first 19 nucleobases of SEQ ID NO: 3066, or a nucleic acid sequence thereof having about 1 or 2 nucleoside substitutions, additions, or deletions; or the sense strand comprises SEQ ID NO: 5474 or a nucleic acid sequence thereof having about 1 or 2 nucleoside substitutions, additions, or deletions, and the antisense strand comprises SEQ ID NO: 5475 or a nucleic acid sequence thereof having about 1 or 2 nucleoside substitutions, additions, or deletions. 394. The pharmaceutical composition of any one of embodiments 1-269, wherein the sense strand comprises SEQ ID NO: 3183, the first 19 nucleobases of SEQ ID NO: 3183, or a nucleic acid sequence thereof having about 1 or 2 nucleoside substitutions, additions, or deletions, and the antisense strand comprises SEQ ID NO: 3184, the first 19 nucleobases of SEQ ID NO: 3184, or a nucleic acid sequence thereof having about 1 or 2 nucleoside substitutions, additions, or deletions; or the sense strand comprises SEQ ID NO: 5476 or a nucleic acid sequence thereof having about 1 or 2 nucleoside substitutions, additions, or deletions, and the antisense strand comprises SEQ ID NO: 5477 or a nucleic acid sequence thereof having about 1 or 2 nucleoside substitutions, additions, or deletions. 395. The pharmaceutical composition of any one of embodiments 1-269, wherein the sense strand comprises SEQ ID NO: 3231, the first 19 nucleobases of SEQ ID NO: 3231, or a nucleic acid sequence thereof having about 1 or 2 nucleoside substitutions, additions, or deletions, and the antisense strand comprises SEQ ID NO: 3232, the first 19 nucleobases of SEQ ID NO: 3232, or a nucleic acid sequence thereof having about 1 or 2 nucleoside substitutions, additions, or deletions; or the sense strand comprises SEQ ID NO: 5478 or a nucleic acid sequence thereof having about 1 or 2 nucleoside substitutions, additions, or deletions, and the antisense strand comprises SEQ ID NO: 5479 or a nucleic acid sequence thereof having about 1 or 2 nucleoside substitutions, additions, or deletions. 396. The pharmaceutical composition of any one of embodiments 1-269, wherein the sense strand comprises SEQ ID NO: 3233, the first 19 nucleobases of SEQ ID NO: 3233, or a nucleic acid sequence thereof having about 1 or 2 nucleoside substitutions, additions, or deletions, and the antisense strand comprises SEQ ID NO: 3234, the first 19 nucleobases of SEQ ID NO: 3234, or a nucleic acid sequence thereof having about 1 or 2 nucleoside substitutions, additions, or deletions; or the sense strand comprises SEQ ID NO: 5480 or a nucleic acid sequence thereof having about 1 or 2 nucleoside substitutions, additions, or deletions, and the antisense strand comprises SEQ ID NO: 5481 or a nucleic acid sequence thereof having about 1 or 2 nucleoside substitutions, additions, or deletions. 397. The pharmaceutical composition of any one of embodiments 1-269, wherein the sense strand comprises SEQ ID NO: 3243, the first 19 nucleobases of SEQ ID NO: 3243, or a nucleic acid sequence thereof having about 1 or 2 nucleoside substitutions, additions, or deletions, and the antisense strand comprises SEQ ID NO: 3244, the first 19 nucleobases of SEQ ID NO: 3244, or a nucleic acid sequence thereof having about 1 or 2 nucleoside substitutions, additions, or deletions; or the sense strand comprises SEQ ID NO: 5482 or a nucleic acid sequence thereof having about 1 or 2 nucleoside substitutions, additions, or deletions, and the antisense strand comprises SEQ ID NO: 5483 or a nucleic acid sequence thereof having about 1 or 2 nucleoside substitutions, additions, or deletions. 398. The pharmaceutical composition of any one of embodiments 1-269, wherein the sense strand comprises SEQ ID NO: 3439, the first 19 nucleobases of SEQ ID NO: 3439, or a nucleic acid sequence thereof having about 1 or 2 nucleoside substitutions, additions, or deletions, and the antisense strand comprises SEQ ID NO: 3440, the first 19 nucleobases of SEQ ID NO: 3440, or a nucleic acid sequence thereof having about 1 or 2 nucleoside substitutions, additions, or deletions; or the sense strand comprises SEQ ID NO: 5484 or a nucleic acid sequence thereof having about 1 or 2 nucleoside substitutions, additions, or deletions, and the antisense strand comprises SEQ ID NO: 5485 or a nucleic acid sequence thereof having about 1 or 2 nucleoside substitutions, additions, or deletions. 399. The pharmaceutical composition of any one of embodiments 1-269, wherein the sense strand comprises SEQ ID NO: 3443, the first 19 nucleobases of SEQ ID NO: 3443, or a nucleic acid sequence thereof having about 1 or 2 nucleoside substitutions, additions, or deletions, and the antisense strand comprises SEQ ID NO: 3444, the first 19 nucleobases of SEQ ID NO: 3444, or a nucleic acid sequence thereof having about 1 or 2 nucleoside substitutions, additions, or deletions; or the sense strand comprises SEQ ID NO: 5486 or a nucleic acid sequence thereof having about 1 or 2 nucleoside substitutions, additions, or deletions, and the antisense strand comprises SEQ ID NO: 5487 or a nucleic acid sequence thereof having about 1 or 2 nucleoside substitutions, additions, or deletions. 400. The pharmaceutical composition of any one of embodiments 1-269, wherein the sense strand comprises SEQ ID NO: 3449, the first 19 nucleobases of SEQ ID NO: 3449, or a nucleic acid sequence thereof having about 1 or 2 nucleoside substitutions, additions, or deletions, and the antisense strand comprises SEQ ID NO: 3450, the first 19 nucleobases of SEQ ID NO: 3450, or a nucleic acid sequence thereof having about 1 or 2 nucleoside substitutions, additions, or deletions; or the sense strand comprises SEQ ID NO: 5488 or a nucleic acid sequence thereof having about 1 or 2 nucleoside substitutions, additions, or deletions, and the antisense strand comprises SEQ ID NO: 5489 or a nucleic acid sequence thereof having about 1 or 2 nucleoside substitutions, additions, or deletions. 401. The pharmaceutical composition of any one of embodiments 1-269, wherein the sense strand comprises SEQ ID NO: 3457, the first 19 nucleobases of SEQ ID NO: 3457, or a nucleic acid sequence thereof having about 1 or 2 nucleoside substitutions, additions, or deletions, and the antisense strand comprises SEQ ID NO: 3458, the first 19 nucleobases of SEQ ID NO: 3458, or a nucleic acid sequence thereof having about 1 or 2 nucleoside substitutions, additions, or deletions; or the sense strand comprises SEQ ID NO: 5490 or a nucleic acid sequence thereof having about 1 or 2 nucleoside substitutions, additions, or deletions, and the antisense strand comprises SEQ ID NO: 5491 or a nucleic acid sequence thereof having about 1 or 2 nucleoside substitutions, additions, or deletions. 402. The pharmaceutical composition of any one of embodiments 1-269, wherein the sense strand comprises SEQ ID NO: 3461, the first 19 nucleobases of SEQ ID NO: 3461, or a nucleic acid sequence thereof having about 1 or 2 nucleoside substitutions, additions, or deletions, and the antisense strand comprises SEQ ID NO: 3462, the first 19 nucleobases of SEQ ID NO: 3462, or a nucleic acid sequence thereof having about 1 or 2 nucleoside substitutions, additions, or deletions; or the sense strand comprises SEQ ID NO: 5492 or a nucleic acid sequence thereof having about 1 or 2 nucleoside substitutions, additions, or deletions, and the antisense strand comprises SEQ ID NO: 5493 or a nucleic acid sequence thereof having about 1 or 2 nucleoside substitutions, additions, or deletions. 403. The pharmaceutical composition of any one of embodiments 1-269, wherein the sense strand comprises SEQ ID NO: 3463, the first 19 nucleobases of SEQ ID NO: 3463, or a nucleic acid sequence thereof having about 1 or 2 nucleoside substitutions, additions, or deletions, and the antisense strand comprises SEQ ID NO: 3464, the first 19 nucleobases of SEQ ID NO: 3464, or a nucleic acid sequence thereof having about 1 or 2 nucleoside substitutions, additions, or deletions; or the sense strand comprises SEQ ID NO: 5494 or a nucleic acid sequence thereof having about 1 or 2 nucleoside substitutions, additions, or deletions, and the antisense strand comprises SEQ ID NO: 5495 or a nucleic acid sequence thereof having about 1 or 2 nucleoside substitutions, additions, or deletions. 404. The pharmaceutical composition of any one of embodiments 1-269, wherein the sense strand comprises SEQ ID NO: 3573, the first 19 nucleobases of SEQ ID NO: 3573, or a nucleic acid sequence thereof having about 1 or 2 nucleoside substitutions, additions, or deletions, and the antisense strand comprises SEQ ID NO: 3574, the first 19 nucleobases of SEQ ID NO: 3574, or a nucleic acid sequence thereof having about 1 or 2 nucleoside substitutions, additions, or deletions; or the sense strand comprises SEQ ID NO: 5496 or a nucleic acid sequence thereof having about 1 or 2 nucleoside substitutions, additions, or deletions, and the antisense strand comprises SEQ ID NO: 5497 or a nucleic acid sequence thereof having about 1 or 2 nucleoside substitutions, additions, or deletions. 405. The pharmaceutical composition of any one of embodiments 1-269, wherein the sense strand comprises SEQ ID NO: 3703, the first 19 nucleobases of SEQ ID NO: 3703, or a nucleic acid sequence thereof having about 1 or 2 nucleoside substitutions, additions, or deletions, and the antisense strand comprises SEQ ID NO: 3704, the first 19 nucleobases of SEQ ID NO: 3704, or a nucleic acid sequence thereof having about 1 or 2 nucleoside substitutions, additions, or deletions; or the sense strand comprises SEQ ID NO: 5498 or a nucleic acid sequence thereof having about 1 or 2 nucleoside substitutions, additions, or deletions, and the antisense strand comprises SEQ ID NO: 5499 or a nucleic acid sequence thereof having about 1 or 2 nucleoside substitutions, additions, or deletions. 406. The pharmaceutical composition of any one of embodiments 1-269, wherein the sense strand comprises SEQ ID NO: 3705, the first 19 nucleobases of SEQ ID NO: 3705, or a nucleic acid sequence thereof having about 1 or 2 nucleoside substitutions, additions, or deletions, and the antisense strand comprises SEQ ID NO: 3706, the first 19 nucleobases of SEQ ID NO: 3706, or a nucleic acid sequence thereof having about 1 or 2 nucleoside substitutions, additions, or deletions; or the sense strand comprises SEQ ID NO: 5500 or a nucleic acid sequence thereof having about 1 or 2 nucleoside substitutions, additions, or deletions, and the antisense strand comprises SEQ ID NO: 5501 or a nucleic acid sequence thereof having about 1 or 2 nucleoside substitutions, additions, or deletions. 407. The pharmaceutical composition of any one of embodiments 1-269, wherein the sense strand comprises SEQ ID NO: 3875, the first 19 nucleobases of SEQ ID NO: 3875, or a nucleic acid sequence thereof having about 1 or 2 nucleoside substitutions, additions, or deletions, and the antisense strand comprises SEQ ID NO: 3876, the first 19 nucleobases of SEQ ID NO: 3876, or a nucleic acid sequence thereof having about 1 or 2 nucleoside substitutions, additions, or deletions; or the sense strand comprises SEQ ID NO: 5502 or a nucleic acid sequence thereof having about 1 or 2 nucleoside substitutions, additions, or deletions, and the antisense strand comprises SEQ ID NO: 5503 or a nucleic acid sequence thereof having about 1 or 2 nucleoside substitutions, additions, or deletions. 408. The pharmaceutical composition of any one of embodiments 1-269, wherein the sense strand comprises SEQ ID NO: 3889, the first 19 nucleobases of SEQ ID NO: 3889, or a nucleic acid sequence thereof having about 1 or 2 nucleoside substitutions, additions, or deletions, and the antisense strand comprises SEQ ID NO: 3890, the first 19 nucleobases of SEQ ID NO: 3890, or a nucleic acid sequence thereof having about 1 or 2 nucleoside substitutions, additions, or deletions; or the sense strand comprises SEQ ID NO: 5504 or a nucleic acid sequence thereof having about 1 or 2 nucleoside substitutions, additions, or deletions, and the antisense strand comprises SEQ ID NO: 5505 or a nucleic acid sequence thereof having about 1 or 2 nucleoside substitutions, additions, or deletions. 409. The pharmaceutical composition of any one of embodiments 1-269, wherein the sense strand comprises SEQ ID NO: 3981, the first 19 nucleobases of SEQ ID NO: 3981, or a nucleic acid sequence thereof having about 1 or 2 nucleoside substitutions, additions, or deletions, and the antisense strand comprises SEQ ID NO: 3982, the first 19 nucleobases of SEQ ID NO: 3982, or a nucleic acid sequence thereof having about 1 or 2 nucleoside substitutions, additions, or deletions; or the sense strand comprises SEQ ID NO: 5506 or a nucleic acid sequence thereof having about 1 or 2 nucleoside substitutions, additions, or deletions, and the antisense strand comprises SEQ ID NO: 5507 or a nucleic acid sequence thereof having about 1 or 2 nucleoside substitutions, additions, or deletions. 410. The pharmaceutical composition of any one of embodiments 1-269, wherein the sense strand comprises SEQ ID NO: 4089, the first 19 nucleobases of SEQ ID NO: 4089, or a nucleic acid sequence thereof having about 1 or 2 nucleoside substitutions, additions, or deletions, and the antisense strand comprises SEQ ID NO: 4090, the first 19 nucleobases of SEQ ID NO: 4090, or a nucleic acid sequence thereof having about 1 or 2 nucleoside substitutions, additions, or deletions; or the sense strand comprises SEQ ID NO: 5508 or a nucleic acid sequence thereof having about 1 or 2 nucleoside substitutions, additions, or deletions, and the antisense strand comprises SEQ ID NO: 5509 or a nucleic acid sequence thereof having about 1 or 2 nucleoside substitutions, additions, or deletions. 411. The pharmaceutical composition of any one of embodiments 1-269, wherein the sense strand comprises SEQ ID NO: 4265, the first 19 nucleobases of SEQ ID NO: 4265, or a nucleic acid sequence thereof having about 1 or 2 nucleoside substitutions, additions, or deletions, and the antisense strand comprises SEQ ID NO: 4266, the first 19 nucleobases of SEQ ID NO: 4266, or a nucleic acid sequence thereof having about 1 or 2 nucleoside substitutions, additions, or deletions; or the sense strand comprises SEQ ID NO: 5510 or a nucleic acid sequence thereof having about 1 or 2 nucleoside substitutions, additions, or deletions, and the antisense strand comprises SEQ ID NO: 5511 or a nucleic acid sequence thereof having about 1 or 2 nucleoside substitutions, additions, or deletions. 412. The pharmaceutical composition of any one of embodiments 1-269, wherein the sense strand comprises SEQ ID NO: 4321, the first 19 nucleobases of SEQ ID NO: 4321, or a nucleic acid sequence thereof having about 1 or 2 nucleoside substitutions, additions, or deletions, and the antisense strand comprises SEQ ID NO: 4322, the first 19 nucleobases of SEQ ID NO: 4322, or a nucleic acid sequence thereof having about 1 or 2 nucleoside substitutions, additions, or deletions; or the sense strand comprises SEQ ID NO: 5512 or a nucleic acid sequence thereof having about 1 or 2 nucleoside substitutions, additions, or deletions, and the antisense strand comprises SEQ ID NO: 5513 or a nucleic acid sequence thereof having about 1 or 2 nucleoside substitutions, additions, or deletions. 413. The pharmaceutical composition of any one of embodiments 1-269, wherein the sense strand comprises SEQ ID NO: 4339, the first 19 nucleobases of SEQ ID NO: 4339, or a nucleic acid sequence thereof having about 1 or 2 nucleoside substitutions, additions, or deletions, and the antisense strand comprises SEQ ID NO: 4340, the first 19 nucleobases of SEQ ID NO: 4340, or a nucleic acid sequence thereof having about 1 or 2 nucleoside substitutions, additions, or deletions; or the sense strand comprises SEQ ID NO: 5514 or a nucleic acid sequence thereof having about 1 or 2 nucleoside substitutions, additions, or deletions, and the antisense strand comprises SEQ ID NO: 5515 or a nucleic acid sequence thereof having about 1 or 2 nucleoside substitutions, additions, or deletions. 414. The pharmaceutical composition of any one of embodiments 1-269, wherein the sense strand comprises SEQ ID NO: 4347, the first 19 nucleobases of SEQ ID NO: 4347, or a nucleic acid sequence thereof having about 1 or 2 nucleoside substitutions, additions, or deletions, and the antisense strand comprises SEQ ID NO: 4348, the first 19 nucleobases of SEQ ID NO: 4348, or a nucleic acid sequence thereof having about 1 or 2 nucleoside substitutions, additions, or deletions; or the sense strand comprises SEQ ID NO: 5516 or a nucleic acid sequence thereof having about 1 or 2 nucleoside substitutions, additions, or deletions, and the antisense strand comprises SEQ ID NO: 5517 or a nucleic acid sequence thereof having about 1 or 2 nucleoside substitutions, additions, or deletions. 415. The pharmaceutical composition of any one of embodiments 1-269, wherein the sense strand comprises SEQ ID NO: 4507, the first 19 nucleobases of SEQ ID NO: 4507, or a nucleic acid sequence thereof having about 1 or 2 nucleoside substitutions, additions, or deletions, and the antisense strand comprises SEQ ID NO: 4508, the first 19 nucleobases of SEQ ID NO: 4508, or a nucleic acid sequence thereof having about 1 or 2 nucleoside substitutions, additions, or deletions; or the sense strand comprises SEQ ID NO: 5518 or a nucleic acid sequence thereof having about 1 or 2 nucleoside substitutions, additions, or deletions, and the antisense strand comprises SEQ ID NO: 5519 or a nucleic acid sequence thereof having about 1 or 2 nucleoside substitutions, additions, or deletions. 416. The pharmaceutical composition of any one of embodiments 1-269, wherein the sense strand comprises SEQ ID NO: 53, the first 19 nucleobases of SEQ ID NO: 53, or a nucleic acid sequence thereof having about 1 or 2 nucleoside substitutions, additions, or deletions, and the antisense strand comprises SEQ ID NO: 54, the first 19 nucleobases of SEQ ID NO: 54, or a nucleic acid sequence thereof having about 1 or 2 nucleoside substitutions, additions, or deletions; or the sense strand comprises SEQ ID NO: 5520 or a nucleic acid sequence thereof having about 1 or 2 nucleoside substitutions, additions, or deletions, and the antisense strand comprises SEQ ID NO: 5521 or a nucleic acid sequence thereof having about 1 or 2 nucleoside substitutions, additions, or deletions. 417. The pharmaceutical composition of any one of embodiments 1-269, wherein the sense strand comprises SEQ ID NO: 2627, the first 19 nucleobases of SEQ ID NO: 2627, or a nucleic acid sequence thereof having about 1 or 2 nucleoside substitutions, additions, or deletions, and the antisense strand comprises SEQ ID NO: 2628, the first 19 nucleobases of SEQ ID NO: 2628, or a nucleic acid sequence thereof having about 1 or 2 nucleoside substitutions, additions, or deletions; or the sense strand comprises SEQ ID NO: 5522 or a nucleic acid sequence thereof having about 1 or 2 nucleoside substitutions, additions, or deletions, and the antisense strand comprises SEQ ID NO: 5523 or a nucleic acid sequence thereof having about 1 or 2 nucleoside substitutions, additions, or deletions. 418. The pharmaceutical composition of any one of embodiments 1-269, wherein the sense strand comprises SEQ ID NO: 2629, the first 19 nucleobases of SEQ ID NO: 2629, or a nucleic acid sequence thereof having about 1 or 2 nucleoside substitutions, additions, or deletions, and the antisense strand comprises SEQ ID NO: 2630, the first 19 nucleobases of SEQ ID NO: 2630, or a nucleic acid sequence thereof having about 1 or 2 nucleoside substitutions, additions, or deletions; or the sense strand comprises SEQ ID NO: 5524 or a nucleic acid sequence thereof having about 1 or 2 nucleoside substitutions, additions, or deletions, and the antisense strand comprises SEQ ID NO: 5525 or a nucleic acid sequence thereof having about 1 or 2 nucleoside substitutions, additions, or deletions. 419. The pharmaceutical composition of any one of embodiments 1-269, wherein the sense strand comprises SEQ ID NO: 3355, the first 19 nucleobases of SEQ ID NO: 3355, or a nucleic acid sequence thereof having about 1 or 2 nucleoside substitutions, additions, or deletions, and the antisense strand comprises SEQ ID NO: 3356, the first 19 nucleobases of SEQ ID NO: 3356, or a nucleic acid sequence thereof having about 1 or 2 nucleoside substitutions, additions, or deletions; or the sense strand comprises SEQ ID NO: 5526 or a nucleic acid sequence thereof having about 1 or 2 nucleoside substitutions, additions, or deletions, and the antisense strand comprises SEQ ID NO: 5527 or a nucleic acid sequence thereof having about 1 or 2 nucleoside substitutions, additions, or deletions. 420. The pharmaceutical composition of any one of embodiments 1-269, wherein the sense strand comprises SEQ ID NO: 3365, the first 19 nucleobases of SEQ ID NO: 3365, or a nucleic acid sequence thereof having about 1 or 2 nucleoside substitutions, additions, or deletions, and the antisense strand comprises SEQ ID NO: 3366, the first 19 nucleobases of SEQ ID NO: 3366, or a nucleic acid sequence thereof having about 1 or 2 nucleoside substitutions, additions, or deletions; or the sense strand comprises SEQ ID NO: 5528 or a nucleic acid sequence thereof having about 1 or 2 nucleoside substitutions, additions, or deletions, and the antisense strand comprises SEQ ID NO: 5529 or a nucleic acid sequence thereof having about 1 or 2 nucleoside substitutions, additions, or deletions. 421. The pharmaceutical composition of any one of embodiments 1-269, wherein the sense strand comprises SEQ ID NO: 87, the first 19 nucleobases of SEQ ID NO: 87, or a nucleic acid sequence thereof having about 1 or 2 nucleoside substitutions, additions, or deletions, and the antisense strand comprises SEQ ID NO: 88, the first 19 nucleobases of SEQ ID NO: 88, or a nucleic acid sequence thereof having about 1 or 2 nucleoside substitutions, additions, or deletions; or the sense strand comprises SEQ ID NO: 5530 or a nucleic acid sequence thereof having about 1 or 2 nucleoside substitutions, additions, or deletions, and the antisense strand comprises SEQ ID NO: 5531 or a nucleic acid sequence thereof having about 1 or 2 nucleoside substitutions, additions, or deletions. 422. The pharmaceutical composition of any one of embodiments 1-269, wherein the sense strand comprises SEQ ID NO: 2329, the first 19 nucleobases of SEQ ID NO: 2329, or a nucleic acid sequence thereof having about 1 or 2 nucleoside substitutions, additions, or deletions, and the antisense strand comprises SEQ ID NO: 2330, the first 19 nucleobases of SEQ ID NO: 2330, or a nucleic acid sequence thereof having about 1 or 2 nucleoside substitutions, additions, or deletions; or the sense strand comprises SEQ ID NO: 5532 or a nucleic acid sequence thereof having about 1 or 2 nucleoside substitutions, additions, or deletions, and the antisense strand comprises SEQ ID NO: 5533 or a nucleic acid sequence thereof having about 1 or 2 nucleoside substitutions, additions, or deletions. 423. The pharmaceutical composition of any one of embodiments 1-269, wherein the sense strand comprises SEQ ID NO: 2379, the first 19 nucleobases of SEQ ID NO: 2379, or a nucleic acid sequence thereof having about 1 or 2 nucleoside substitutions, additions, or deletions, and the antisense strand comprises SEQ ID NO: 2380, the first 19 nucleobases of SEQ ID NO: 2380, or a nucleic acid sequence thereof having about 1 or 2 nucleoside substitutions, additions, or deletions; or the sense strand comprises SEQ ID NO: 5534 or a nucleic acid sequence thereof having about 1 or 2 nucleoside substitutions, additions, or deletions, and the antisense strand comprises SEQ ID NO: 5535 or a nucleic acid sequence thereof having about 1 or 2 nucleoside substitutions, additions, or deletions. 424. The pharmaceutical composition of any one of embodiments 1-269, wherein the sense strand comprises SEQ ID NO: 2381, the first 19 nucleobases of SEQ ID NO: 2381, or a nucleic acid sequence thereof having about 1 or 2 nucleoside substitutions, additions, or deletions, and the antisense strand comprises SEQ ID NO: 2382, the first 19 nucleobases of SEQ ID NO: 2382, or a nucleic acid sequence thereof having about 1 or 2 nucleoside substitutions, additions, or deletions; or the sense strand comprises SEQ ID NO: 5536 or a nucleic acid sequence thereof having about 1 or 2 nucleoside substitutions, additions, or deletions, and the antisense strand comprises SEQ ID NO: 5537 or a nucleic acid sequence thereof having about 1 or 2 nucleoside substitutions, additions, or deletions. 425. The pharmaceutical composition of any one of embodiments 1-269, wherein the sense strand comprises SEQ ID NO: 2521, the first 19 nucleobases of SEQ ID NO: 2521, or a nucleic acid sequence thereof having about 1 or 2 nucleoside substitutions, additions, or deletions, and the antisense strand comprises SEQ ID NO: 2522, the first 19 nucleobases of SEQ ID NO: 2522, or a nucleic acid sequence thereof having about 1 or 2 nucleoside substitutions, additions, or deletions; or the sense strand comprises SEQ ID NO: 5538 or a nucleic acid sequence thereof having about 1 or 2 nucleoside substitutions, additions, or deletions, and the antisense strand comprises SEQ ID NO: 5539 or a nucleic acid sequence thereof having about 1 or 2 nucleoside substitutions, additions, or deletions. 426. The pharmaceutical composition of any one of embodiments 1-269, wherein the sense strand comprises SEQ ID NO: 2525, the first 19 nucleobases of SEQ ID NO: 2525, or a nucleic acid sequence thereof having about 1 or 2 nucleoside substitutions, additions, or deletions, and the antisense strand comprises SEQ ID NO: 2526, the first 19 nucleobases of SEQ ID NO: 2526, or a nucleic acid sequence thereof having about 1 or 2 nucleoside substitutions, additions, or deletions; or the sense strand comprises SEQ ID NO: 5540 or a nucleic acid sequence thereof having about 1 or 2 nucleoside substitutions, additions, or deletions, and the antisense strand comprises SEQ ID NO: 5541 or a nucleic acid sequence thereof having about 1 or 2 nucleoside substitutions, additions, or deletions. 427. The pharmaceutical composition of any one of embodiments 1-269, wherein the sense strand comprises SEQ ID NO: 2607, the first 19 nucleobases of SEQ ID NO: 2607, or a nucleic acid sequence thereof having about 1 or 2 nucleoside substitutions, additions, or deletions, and the antisense strand comprises SEQ ID NO: 2608, the first 19 nucleobases of SEQ ID NO: 2608, or a nucleic acid sequence thereof having about 1 or 2 nucleoside substitutions, additions, or deletions; or the sense strand comprises SEQ ID NO: 5542 or a nucleic acid sequence thereof having about 1 or 2 nucleoside substitutions, additions, or deletions, and the antisense strand comprises SEQ ID NO: 5543 or a nucleic acid sequence thereof having about 1 or 2 nucleoside substitutions, additions, or deletions. 428. The pharmaceutical composition of any one of embodiments 1-269, wherein the sense strand comprises SEQ ID NO: 3057, the first 19 nucleobases of SEQ ID NO: 3057, or a nucleic acid sequence thereof having about 1 or 2 nucleoside substitutions, additions, or deletions, and the antisense strand comprises SEQ ID NO: 3058, the first 19 nucleobases of SEQ ID NO: 3058, or a nucleic acid sequence thereof having about 1 or 2 nucleoside substitutions, additions, or deletions; or the sense strand comprises SEQ ID NO: 5544 or a nucleic acid sequence thereof having about 1 or 2 nucleoside substitutions, additions, or deletions, and the antisense strand comprises SEQ ID NO: 5545 or a nucleic acid sequence thereof having about 1 or 2 nucleoside substitutions, additions, or deletions. 429. The pharmaceutical composition of any one of embodiments 1-269, wherein the sense strand comprises SEQ ID NO: 3061, the first 19 nucleobases of SEQ ID NO: 3061, or a nucleic acid sequence thereof having about 1 or 2 nucleoside substitutions, additions, or deletions, and the antisense strand comprises SEQ ID NO: 3062, the first 19 nucleobases of SEQ ID NO: 3062, or a nucleic acid sequence thereof having about 1 or 2 nucleoside substitutions, additions, or deletions; or the sense strand comprises SEQ ID NO: 5546 or a nucleic acid sequence thereof having about 1 or 2 nucleoside substitutions, additions, or deletions, and the antisense strand comprises SEQ ID NO: 5547 or a nucleic acid sequence thereof having about 1 or 2 nucleoside substitutions, additions, or deletions. 430. The pharmaceutical composition of any one of embodiments 1-269, wherein the sense strand comprises SEQ ID NO: 3067, the first 19 nucleobases of SEQ ID NO: 3067, or a nucleic acid sequence thereof having about 1 or 2 nucleoside substitutions, additions, or deletions, and the antisense strand comprises SEQ ID NO: 3068, the first 19 nucleobases of SEQ ID NO: 3068, or a nucleic acid sequence thereof having about 1 or 2 nucleoside substitutions, additions, or deletions; or the sense strand comprises SEQ ID NO: 5548 or a nucleic acid sequence thereof having about 1 or 2 nucleoside substitutions, additions, or deletions, and the antisense strand comprises SEQ ID NO: 5549 or a nucleic acid sequence thereof having about 1 or 2 nucleoside substitutions, additions, or deletions. 431. The pharmaceutical composition of any one of embodiments 1-269, wherein the sense strand comprises SEQ ID NO: 3501, the first 19 nucleobases of SEQ ID NO: 3501, or a nucleic acid sequence thereof having about 1 or 2 nucleoside substitutions, additions, or deletions, and the antisense strand comprises SEQ ID NO: 3502, the first 19 nucleobases of SEQ ID NO: 3502, or a nucleic acid sequence thereof having about 1 or 2 nucleoside substitutions, additions, or deletions; or the sense strand comprises SEQ ID NO: 5550 or a nucleic acid sequence thereof having about 1 or 2 nucleoside substitutions, additions, or deletions, and the antisense strand comprises SEQ ID NO: 5551 or a nucleic acid sequence thereof having about 1 or 2 nucleoside substitutions, additions, or deletions. 432. The pharmaceutical composition of any one of embodiments 1-269, wherein the sense strand comprises SEQ ID NO: 3503, the first 19 nucleobases of SEQ ID NO: 3503, or a nucleic acid sequence thereof having about 1 or 2 nucleoside substitutions, additions, or deletions, and the antisense strand comprises SEQ ID NO: 3504, the first 19 nucleobases of SEQ ID NO: 3504, or a nucleic acid sequence thereof having about 1 or 2 nucleoside substitutions, additions, or deletions; or the sense strand comprises SEQ ID NO: 5552 or a nucleic acid sequence thereof having about 1 or 2 nucleoside substitutions, additions, or deletions, and the antisense strand comprises SEQ ID NO: 5553 or a nucleic acid sequence thereof having about 1 or 2 nucleoside substitutions, additions, or deletions. 433. The pharmaceutical composition of any one of embodiments 1-269, wherein the sense strand comprises SEQ ID NO: 3873, the first 19 nucleobases of SEQ ID NO: 3873, or a nucleic acid sequence thereof having about 1 or 2 nucleoside substitutions, additions, or deletions, and the antisense strand comprises SEQ ID NO: 3874, the first 19 nucleobases of SEQ ID NO: 3874, or a nucleic acid sequence thereof having about 1 or 2 nucleoside substitutions, additions, or deletions; or the sense strand comprises SEQ ID NO: 5554 or a nucleic acid sequence thereof having about 1 or 2 nucleoside substitutions, additions, or deletions, and the antisense strand comprises SEQ ID NO: 5555 or a nucleic acid sequence thereof having about 1 or 2 nucleoside substitutions, additions, or deletions. 434. The pharmaceutical composition of any one of embodiments 1-269, wherein the sense strand comprises SEQ ID NO: 4179, the first 19 nucleobases of SEQ ID NO: 4179, or a nucleic acid sequence thereof having about 1 or 2 nucleoside substitutions, additions, or deletions, and the antisense strand comprises SEQ ID NO: 4180, the first 19 nucleobases of SEQ ID NO: 4180, or a nucleic acid sequence thereof having about 1 or 2 nucleoside substitutions, additions, or deletions; or the sense strand comprises SEQ ID NO: 5556 or a nucleic acid sequence thereof having about 1 or 2 nucleoside substitutions, additions, or deletions, and the antisense strand comprises SEQ ID NO: 5557 or a nucleic acid sequence thereof having about 1 or 2 nucleoside substitutions, additions, or deletions. 435. The pharmaceutical composition of any one of embodiments 1-269, wherein the sense strand comprises SEQ ID NO: 3027, the first 19 nucleobases of SEQ ID NO: 3027, or a nucleic acid sequence thereof having about 1 or 2 nucleoside substitutions, additions, or deletions, and the antisense strand comprises SEQ ID NO: 3028, the first 19 nucleobases of SEQ ID NO: 3028, or a nucleic acid sequence thereof having about 1 or 2 nucleoside substitutions, additions, or deletions; or the sense strand comprises SEQ ID NO: 5558 or a nucleic acid sequence thereof having about 1 or 2 nucleoside substitutions, additions, or deletions, and the antisense strand comprises SEQ ID NO: 5559 or a nucleic acid sequence thereof having about 1 or 2 nucleoside substitutions, additions, or deletions. 436. The pharmaceutical composition of any one of embodiments 1-269, wherein the sense strand comprises SEQ ID NO: 3037, the first 19 nucleobases of SEQ ID NO: 3037, or a nucleic acid sequence thereof having about 1 or 2 nucleoside substitutions, additions, or deletions, and the antisense strand comprises SEQ ID NO: 3038, the first 19 nucleobases of SEQ ID NO: 3038, or a nucleic acid sequence thereof having about 1 or 2 nucleoside substitutions, additions, or deletions; or the sense strand comprises SEQ ID NO: 5560 or a nucleic acid sequence thereof having about 1 or 2 nucleoside substitutions, additions, or deletions, and the antisense strand comprises SEQ ID NO: 5561 or a nucleic acid sequence thereof having about 1 or 2 nucleoside substitutions, additions, or deletions. 437. The pharmaceutical composition of any one of embodiments 1-269, wherein the sense strand comprises SEQ ID NO: 3183, the first 19 nucleobases of SEQ ID NO: 3183, or a nucleic acid sequence thereof having about 1 or 2 nucleoside substitutions, additions, or deletions, and the antisense strand comprises SEQ ID NO: 3184, the first 19 nucleobases of SEQ ID NO: 3184, or a nucleic acid sequence thereof having about 1 or 2 nucleoside substitutions, additions, or deletions; or the sense strand comprises SEQ ID NO: 5562 or a nucleic acid sequence thereof having about 1 or 2 nucleoside substitutions, additions, or deletions, and the antisense strand comprises SEQ ID NO: 5563 or a nucleic acid sequence thereof having about 1 or 2 nucleoside substitutions, additions, or deletions. 438. The pharmaceutical composition of any one of embodiments 1-269, wherein the sense strand comprises SEQ ID NO: 4265, the first 19 nucleobases of SEQ ID NO: 4265, or a nucleic acid sequence thereof having about 1 or 2 nucleoside substitutions, additions, or deletions, and the antisense strand comprises SEQ ID NO: 4266, the first 19 nucleobases of SEQ ID NO: 4266, or a nucleic acid sequence thereof having about 1 or 2 nucleoside substitutions, additions, or deletions; or the sense strand comprises SEQ ID NO: 5564 or a nucleic acid sequence thereof having about 1 or 2 nucleoside substitutions, additions, or deletions, and the antisense strand comprises SEQ ID NO: 5565 or a nucleic acid sequence thereof having about 1 or 2 nucleoside substitutions, additions, or deletions. 439. The pharmaceutical composition of any one of embodiments 1-269, wherein the sense strand comprises SEQ ID NO: 2629, the first 19 nucleobases of SEQ ID NO: 2629, or a nucleic acid sequence thereof having about 1 or 2 nucleoside substitutions, additions, or deletions, and the antisense strand comprises SEQ ID NO: 2630, the first 19 nucleobases of SEQ ID NO: 2630, or a nucleic acid sequence thereof having about 1 or 2 nucleoside substitutions, additions, or deletions; or the sense strand comprises SEQ ID NO: 5566 or a nucleic acid sequence thereof having about 1 or 2 nucleoside substitutions, additions, or deletions, and the antisense strand comprises SEQ ID NO: 5567 or a nucleic acid sequence thereof having about 1 or 2 nucleoside substitutions, additions, or deletions. 440. The pharmaceutical composition of any one of embodiments 1-269, wherein the sense strand comprises one or more sequences selected from SEQ ID NOS: 1-5349, 5366-5971, 6000-6038, 6050-6074, or a nucleic acid sequence thereof having about 1 or 2 nucleoside substitutions, additions, or deletions. 441. The pharmaceutical composition of any one of embodiments 1-269, wherein the antisense strand comprises one or more sequences selected from SEQ ID NOS: 1-5349, 5366-5971, 6000-6038, 6050-6074, or a nucleic acid sequence thereof having about 1 or 2 nucleoside substitutions, additions, or deletions.

[0313] 442. A pharmaceutical composition comprising a nucleic acid sequence comprising Formula IA: 5′ Z1-U-Z2-G-Z3-U-C-Z4-A-U-U-Z5-L 3′, wherein Z1 is 0, 3, 5, 11, or 13 nucleosides; Z2 is 1 nucleoside; Z3 is 0, 2, 5, 8, or 10 nucleosides; Z4 is 0, 2, 3, 5, 8, or 11 nucleosides; Z5 is 0 or 3 nucleosides; each “-” is independently a phosphodiester or modified internucleoside linkage; and L is an optional lipid; wherein the nucleic acid comprises a modified nucleoside and/or modified internucleoside linkage. 443. The pharmaceutical composition of embodiment 442, wherein Z1 is 0 nucleosides. 444. The pharmaceutical composition of embodiment 442, wherein Z1 is 3, 5, 11, or 13 nucleosides. 445. The pharmaceutical composition of embodiment 444, wherein Z1 comprises UGGUG, CAGGU, CAGGUUUGCCACU (SEQ ID NO: 6007), GCACCUUUUCA (SEQ ID NO: 6008), or AGC or a nucleic acid sequence thereof having about 1 or 2 nucleoside substitutions, additions, or deletions. 446. The pharmaceutical composition of any one of embodiments 442-445, wherein Z2 comprises C, G, or U. 447. The pharmaceutical composition of any one of embodiments 442-446, wherein Z3 is 0 nucleosides. 448. The pharmaceutical composition of any one of embodiments 442-446, wherein Z3 is 2, 5, 8, or 10 nucleosides. 449. The pharmaceutical composition of embodiment 448, wherein Z3 comprises UG, UGUCGAGAGA (SEQ ID NO: 6009), AGAGA, AGAGA, CCACUUUG, or AGCCU or a nucleic acid sequence thereof having about 1 or 2 nucleoside substitutions, additions, or deletions. 450. The pharmaceutical composition of any one of embodiments 442-449, wherein Z4 is 0 nucleosides. 451. The pharmaceutical composition of any one of embodiments 442-449, wherein Z4 is 2, 3, 5, 8, or 11 nucleosides. 452. The pharmaceutical composition of embodiment 451, wherein Z4 comprises GAGAGAUCACU (SEQ ID NO: 6010), ACU, ACUGAAAU, UC, or CUAAC or a nucleic acid sequence thereof having about 1 or 2 nucleoside substitutions, additions, or deletions. 453. The pharmaceutical composition of any one of embodiments 442-452, wherein Z5 represents 0 nucleosides. 454. The pharmaceutical composition of any one of embodiments 442-452, wherein Z5 represents 3 nucleosides. 455. The pharmaceutical composition of embodiment 454, wherein Z5 comprises UUU, UUC, UUA, UUG, CUU, CUC, CUA, CUG, AUU, AUC, AUA, AUG, GUU, GUC, GUA, GUG, UCU, UCC, UCA, UCG, CCU, CCC, CCA, CCG, ACU, ACC, ACA, ACG, GCU, GCC, GCA, GCG, UAU, UAC, UAA, UAG, CAU, CAC, CAA, CAG, AAU, AAC, AAA, AAG, GAU, GAC, GAA, GAG, UGU, UGC, UGA, UGG, CGU, CGC, CGA, CGG, AGU, AGC, AGA, AGG, GGU, GGC, GGA, or GGG. 456. The pharmaceutical composition of any one of embodiments 442-455, wherein one or more of the Z5 nucleosides comprise a deoxyribose. 457. The pharmaceutical composition of embodiment 456, wherein the one or more is one. 458. The pharmaceutical composition of embodiment 456, wherein the one or more is two. 459. The pharmaceutical composition of embodiment 456, wherein the one or more is three. 460. The pharmaceutical composition of any one of embodiments 442-459, comprising the lipid. 461. The pharmaceutical composition of embodiment 460, wherein the lipid comprises cholesterol, myristoyl, palmitoyl, stearoyl, lithocholoyl, docosanoyl, docosahexaenoyl, myristyl, palmityl stearyl, or α-tocopherol, or a combination thereof. 462. The pharmaceutical composition of any one of embodiments 442-461, wherein Z1-U-Z2-G-Z3-U-C-Z4 comprises UGGUGUCGAGAGAUCACU (SEQ ID NO: 6011) or a nucleic acid sequence thereof having about 1 or 2 nucleoside substitutions, additions, or deletions. 463. The pharmaceutical composition of any one of embodiments 442-461, wherein Z1-U-Z2-G-Z3-U-C-Z4 comprises UCGAGAGAUCACUGAAAU (SEQ ID NO: 6012) or a nucleic acid sequence thereof having about 1 or 2 nucleoside substitutions, additions, or deletions. 464. The pharmaceutical composition of any one of embodiments 442-461, wherein Z1-U-Z2-G-Z3-U-C-Z4 comprises CAGGUUUGCCACUUUGUC (SEQ ID NO: 6013) or a nucleic acid sequence thereof having about 1 or 2 nucleoside substitutions, additions, or deletions. 465. The pharmaceutical composition of any one of embodiments 442-461, wherein Z1-U-Z2-G-Z3-U-C-Z4 comprises GCACCUUUUCAUGGUCUC (SEQ ID NO: 6014) or a nucleic acid sequence thereof having about 1 or 2 nucleoside substitutions, additions, or deletions. 466. The pharmaceutical composition of any one of embodiments 442-461, wherein Z1-U-Z2-G-Z3-U-C-Z4 comprises AGCUGGAGCCUUCCUAAC (SEQ ID NO: 15) or a nucleic acid sequence thereof having about 1 or 2 nucleoside substitutions, additions, or deletions. 467. The pharmaceutical composition of any one of embodiments 442-461, comprising mUsmGsmGmUfGmUfCfGfAmGmAmGmAmUmCmAmCmUmAsmUsmU (SEQ ID NO: 5558), or a nucleic acid sequence thereof having about 1 or 2 nucleoside substitutions, additions, or deletions; wherein “fN” is a 2′ fluoro-modified nucleoside, “mN” is a 2′ O-methyl modified nucleoside, “-” is a phosphodiester, and “s” is a phosphorothioate. 468. The pharmaceutical composition of any one of embodiments 442-461, comprising mUsmCsmGmAfGmAfGfAfUmCmAmCmUmGmAmAmAmUmAsmUsmU (SEQ ID NO: 5560), or a nucleic acid sequence thereof having about 1 or 2 nucleoside substitutions, additions, or deletions; wherein “fN” is a 2′ fluoro-modified nucleoside, “mN” is a 2′ O-methyl modified nucleoside, “-” is a phosphodiester, and “s” is a phosphorothioate. 469. The pharmaceutical composition of any one of embodiments 442-461, comprising mCsmAsmGmGfUmUfUfGfCmCmAmCmUmUmUmGmUmCmAsmUsmU (SEQ ID NO: 5562), or a nucleic acid sequence thereof having about 1 or 2 nucleoside substitutions, additions, or deletions; wherein “fN” is a 2′ fluoro-modified nucleoside, “mN” is a 2′ O-methyl modified nucleoside, “-” is a phosphodiester, and “s” is a phosphorothioate. 470. The pharmaceutical composition of any one of embodiments 442-461, comprising mGsmCsmAmCfCmUfUfUfUmCmAmUmGmGmUmCmUmCmAsmUsmU (SEQ ID NO: 5564), or a nucleic acid sequence thereof having about 1 or 2 nucleoside substitutions, additions, or deletions; wherein “fN” is a 2′ fluoro-modified nucleoside, “mN” is a 2′ O-methyl modified nucleoside, “-” is a phosphodiester, and “s” is a phosphorothioate. 471. The pharmaceutical composition of any one of embodiments 442-461, comprising mAsmGsmCmUfGmGfAfGfCmCmUmUmCmCmUmAmAmCmAsmUsmU (SEQ ID NO: 5566), or a nucleic acid sequence thereof having about 1 or 2 nucleoside substitutions, additions, or deletions; wherein “fN” is a 2′ fluoro-modified nucleoside, “mN” is a 2′ O-methyl modified nucleoside, “-” is a phosphodiester, and “s” is a phosphorothioate. 472. The pharmaceutical composition of any one of embodiments 442-461, wherein the Z1-U-Z2-G-Z3-U-C-Z4-A-U-U sequence of Formula 1A is twenty-one nucleosides in length. 473. The pharmaceutical composition of any one of embodiments 442-461, wherein the antisense strand comprises the reserve complement of Z1-U-Z2-G-Z3-U-C-Z4.

[0314] 474. A pharmaceutical composition comprising a nucleic acid sequence comprising Formula IB: 5′ U-Z6-G-A-Z7-C-Z8-A-Z9-U-U 3′, wherein Z6 represents 0, 2, 3, 5, 8, or 11 nucleosides; Z7 represents 0, 2, 5, 8, or 10 nucleosides; Z8 represents 1 nucleoside; Z9 represents 0, 3, 5, 11, or 13 nucleosides; and each “-” is independently a phosphodiester or modified internucleoside linkage. 475. The pharmaceutical composition of any one of embodiments 442-473 further comprising an anti-sense strand comprising Formula IB: 5′ U-Z6-G-A-Z7-C-Z8-A-Z9-U-U 3′, wherein Z6 represents 0, 2, 3, 5, 8, or 11 nucleosides; Z7 represents 0, 2, 5, 8, or 10 nucleosides; Z8 represents 1 nucleoside; Z9 represents 0, 3, 5, 11, or 13 nucleosides; and each “-” is independently a phosphodiester or modified internucleoside linkage. 476. The pharmaceutical composition of embodiment 474 or embodiment 475, wherein Z6 is 0 nucleosides. 477. The pharmaceutical composition of embodiment 474 or embodiment 475, wherein Z6 is 0, 2, 3, 5, 8, or 11 nucleosides. 478. The pharmaceutical composition of embodiment 477, wherein Z6 comprises AGU, AGUGAUCUCUC (SEQ ID NO: 6016), AUUUCAGU, GA, or GUUAG, or a nucleic acid sequence thereof having about 1 or 2 nucleoside substitutions, additions, or deletions. 479. The pharmaceutical composition of any one of embodiments 474-478, wherein Z7 is 0 nucleosides. 480. The pharmaceutical composition of any one of embodiments 474-478, wherein Z7 is 0, 2, 5, 8, or 10 nucleosides. 481. The pharmaceutical composition of embodiment 480, wherein Z7 comprises UCUCU, CA, UCUCU, CAAAGUGG, GA, or AGGCU, or a nucleic acid sequence thereof having about 1 or 2 nucleoside substitutions, additions, or deletions. 482. The pharmaceutical composition of any one of embodiments 474-481, wherein Z8 comprises C, G, or A. 483. The pharmaceutical composition of any one of embodiments 474-482, wherein Z9 is 0 nucleosides. 484. The pharmaceutical composition of any one of embodiments 474-482, wherein Z9 is 3, 5, 11, or 13 nucleosides. 485. The pharmaceutical composition of embodiment 484, wherein Z9 comprises CACCA, AGUGGCAAACCUG (SEQ ID NO: 6017), ACCUG, UGAAAAGGUGC (SEQ ID NO: 6018), or GCU, or a nucleic acid sequence thereof having about 1 or 2 nucleoside substitutions, additions, or deletions. 486. The pharmaceutical composition of any one of embodiments 474-485, wherein Z6-G-A-Z7-C-Z8-A-Z9 comprises AGUGAUCUCUCGACACCA (SEQ ID NO: 6019), or a nucleic acid sequence thereof having about 1 or 2 nucleoside substitutions, additions, or deletions. 487. The pharmaceutical composition of any one of embodiments 474-485, wherein Z6-G-A-Z7-C-Z8-A-Z9 comprises AUUUCAGUGAUCUCUCGA (SEQ ID NO: 6020), or a nucleic acid sequence thereof having about 1 or 2 nucleoside substitutions, additions, or deletions. 488. The pharmaceutical composition of any one of embodiments 474-485, wherein Z6-G-A-Z7-C-Z8-A-Z9 comprises GACAAAGUGGCAAACCUG (SEQ ID NO: 6021), or a nucleic acid sequence thereof having about 1 or 2 nucleoside substitutions, additions, or deletions. 489. The pharmaceutical composition of any one of embodiments 474-485, wherein Z6-G-A-Z7-C-Z8-A-Z9 comprises GAGACCAUGAAAAGGUGC (SEQ ID NO: 6022), or a nucleic acid sequence thereof having about 1 or 2 nucleoside substitutions, additions, or deletions. 490. The pharmaceutical composition of any one of embodiments 474-485, wherein Z6-G-A-Z7-C-Z8-A-Z9 comprises GUUAGGAAGGCUCCAGCU (SEQ ID NO: 6023), or a nucleic acid sequence thereof having about 1 or 2 nucleoside substitutions, additions, or deletions. 491. The pharmaceutical composition of any one of embodiments 474-485, wherein the antisense strand comprises mUsfAsmGmUmGfAmUmCmUmCmUmCmGfAmCfAmCmCmAsmUsmU (SEQ ID NO: 5559), or a nucleic acid sequence thereof having about 1 or 2 nucleoside substitutions, additions, or deletions; wherein “fN” is a 2′ fluoro-modified nucleoside, “mN” is a 2′ O-methyl modified nucleoside, “-” is a phosphodiester, and “s” is a phosphorothioate. 492. The pharmaceutical composition of any one of embodiments 474-485, wherein the antisense strand comprises mUsfAsmUmUmUfCmAmGmUmGmAmUmCfUmCfUmCmGmAsmUsmU (SEQ ID NO: 5561), or a nucleic acid sequence thereof having about 1 or 2 nucleoside substitutions, additions, or deletions; wherein “fN” is a 2′ fluoro-modified nucleoside, “mN” is a 2′ O-methyl modified nucleoside, “-” is a phosphodiester, and “s” is a phosphorothioate. 493. The pharmaceutical composition of any one of embodiments 474-485, wherein the antisense strand comprises mUsfGsmAmCmAfAmAmGmUmGmGmCmAfAmAfCmCmUmGsmUsmU (SEQ ID NO: 5563), or a nucleic acid sequence thereof having about 1 or 2 nucleoside substitutions, additions, or deletions; wherein “fN” is a 2′ fluoro-modified nucleoside, “mN” is a 2′ O-methyl modified nucleoside, “-” is a phosphodiester, and “s” is a phosphorothioate. 494. The pharmaceutical composition of any one of embodiments 474-485, wherein the antisense strand comprises mUsfGsmAmGmAfCmCmAmUmGmAmAmAfAmGfGmUmGmCsmUsmU (SEQ ID NO: 5565), or a nucleic acid sequence thereof having about 1 or 2 nucleoside substitutions, additions, or deletions; wherein “fN” is a 2′ fluoro-modified nucleoside, “mN” is a 2′ O-methyl modified nucleoside, “-” is a phosphodiester, and “s” is a phosphorothioate. 495. The pharmaceutical composition of any one of embodiments 474-485, wherein the antisense strand comprises mUsfGsmUmUmAfGmGmAmAmGmGmCmUfCmCfAmGmCmUsmUsmU (SEQ ID NO: 5567), or a nucleic acid sequence thereof having about 1 or 2 nucleoside substitutions, additions, or deletions; wherein “fN” is a 2′ fluoro-modified nucleoside, “mN” is a 2′ O-methyl modified nucleoside, “-” is a phosphodiester, and “s” is a phosphorothioate. 496. The pharmaceutical composition of any one of embodiments 474-485, wherein the U-Z6-G-A-Z7-C-Z8-A-Z9-U-U is 21 nucleosides in length.

[0315] 497. A pharmaceutical composition comprising a sense strand and an antisense strand, wherein the sense strand comprises UGGUGUCGAGAGAUCACUG (SEQ ID NO: 5664) or a nucleic acid sequence thereof having about 1 or 2 nucleoside substitutions, additions, or deletions; and the antisense strand comprises CAGUGAUCUCUCGACACCA (SEQ ID NO: 5765) or a nucleic acid sequence thereof having about 1 or 2 nucleoside substitutions, additions, or deletions. 498. A pharmaceutical composition comprising a sense strand and an antisense strand, wherein the sense strand comprises UGGUGUCGAGAGAUCACUA (SEQ ID NO: 5866) or a nucleic acid sequence thereof having about 1 or 2 nucleoside substitutions, additions, or deletions; and the antisense strand comprises UAGUGAUCUCUCGACACCA (SEQ ID NO: 5967) or a nucleic acid sequence thereof having about 1 or 2 nucleoside substitutions, additions, or deletions. 499. A pharmaceutical composition comprising a sense strand and an antisense strand, wherein the sense strand comprises mUsmGsmGmUfGmUfCfGfAmGmAmGmAmUmCmAmCmUmAsmUsmU (SEQ ID NO: 5558) or a nucleic acid sequence thereof having about 1 or 2 nucleoside substitutions, additions, or deletions; and the antisense strand comprises mUsfAsmGmUmGfAmUmCmUmCmUmCmGfAmCfAmCmCmAsmUsmU (SEQ ID NO: 5559) or a nucleic acid sequence thereof having about 1 or 2 nucleoside substitutions, additions, or deletions.

[0316] 500. A pharmaceutical composition comprising a sense strand and an antisense strand, wherein the sense strand comprises UCGAGAGAUCACUGAAAUC (SEQ ID NO: 5665) or a nucleic acid sequence thereof having about 1 or 2 nucleoside substitutions, additions, or deletions; and the antisense strand comprises GAUUUCAGUGAUCUCUCGA (SEQ ID NO: 5766) or a nucleic acid sequence thereof having about 1 or 2 nucleoside substitutions, additions, or deletions. 501. A pharmaceutical composition comprising a sense strand and an antisense strand, wherein the sense strand comprises UCGAGAGAUCACUGAAAUA (SEQ ID NO: 5867) or a nucleic acid sequence thereof having about 1 or 2 nucleoside substitutions, additions, or deletions; and the antisense strand comprises UAUUUCAGUGAUCUCUCGA (SEQ ID NO: 5968) or a nucleic acid sequence thereof having about 1 or 2 nucleoside substitutions, additions, or deletions. 502. A pharmaceutical composition comprising a sense strand and an antisense strand, wherein the sense strand comprises mUsmCsmGmAfGmAfGfAfUmCmAmCmUmGmAmAmAmUmAsmUsmU (SEQ ID NO: 5560) or a nucleic acid sequence thereof having about 1 or 2 nucleoside substitutions, additions, or deletions; and the antisense strand comprises mUsfAsmUmUmUfCmAmGmUmGmAmUmCfUmCfUmCmGmAsmUsmU (SEQ ID NO: 5561) or a nucleic acid sequence thereof having about 1 or 2 nucleoside substitutions, additions, or deletions. 503. A pharmaceutical composition comprising a sense strand and an antisense strand, wherein the sense strand comprises CAGGUUUGCCACUUUGUCA (SEQ ID NO: 5868) or a nucleic acid sequence thereof having about 1 or 2 nucleoside substitutions, additions, or deletions; and the antisense strand comprises UGACAAAGUGGCAAACCUG (SEQ ID NO: 5969) or a nucleic acid sequence thereof having about 1 or 2 nucleoside substitutions, additions, or deletions. 504. A pharmaceutical composition comprising a sense strand and an antisense strand, wherein the sense strand comprises CAGGUUUGCCACUUUGUCA (SEQ ID NO: 5868) or a nucleic acid sequence thereof having about 1 or 2 nucleoside substitutions, additions, or deletions; and the antisense strand comprises UGACAAAGUGGCAAACCUG (SEQ ID NO: 5969) or a nucleic acid sequence thereof having about 1 or 2 nucleoside substitutions, additions, or deletions. 505. A pharmaceutical composition comprising a sense strand and an antisense strand, wherein the sense strand comprises mCsmAsmGmGfUmUfUfGfCmCmAmCmUmUmUmGmUmCmAsmUsmU (SEQ ID NO: 5562) or a nucleic acid sequence thereof having about 1 or 2 nucleoside substitutions, additions, or deletions; and the antisense strand comprises mUsfGsmAmCmAfAmAmGmUmGmGmCmAfAmAfCmCmUmGsmUsmU (SEQ ID NO: 5563) or a nucleic acid sequence thereof having about 1 or 2 nucleoside substitutions, additions, or deletions. 506. A pharmaceutical composition comprising a sense strand and an antisense strand, wherein the sense strand comprises GCACCUUUUCAUGGUCUCU (SEQ ID NO: 5667) or a nucleic acid sequence thereof having about 1 or 2 nucleoside substitutions, additions, or deletions; and the antisense strand comprises AGAGACCAUGAAAAGGUGC (SEQ ID NO: 5768) or a nucleic acid sequence thereof having about 1 or 2 nucleoside substitutions, additions, or deletions. 507. A pharmaceutical composition comprising a sense strand and an antisense strand, wherein the sense strand comprises GCACCUUUUCAUGGUCUCA (SEQ ID NO: 5869) or a nucleic acid sequence thereof having about 1 or 2 nucleoside substitutions, additions, or deletions; and the antisense strand comprises UGAGACCAUGAAAAGGUGC (SEQ ID NO: 5970) or a nucleic acid sequence thereof having about 1 or 2 nucleoside substitutions, additions, or deletions. 508. A pharmaceutical composition comprising a sense strand and an antisense strand, wherein the sense strand comprises mGsmCsmAmCfCmUfUfUfUmCmAmUmGmGmUmCmUmCmAsmUsmU (SEQ ID NO: 5564) or a nucleic acid sequence thereof having about 1 or 2 nucleoside substitutions, additions, or deletions; and the antisense strand comprises mUsfGsmAmGmAfCmCmAmUmGmAmAmAfAmGfGmUmGmCsmUsmU (SEQ ID NO: 5565) or a nucleic acid sequence thereof having about 1 or 2 nucleoside substitutions, additions, or deletions. 509. A pharmaceutical composition comprising a sense strand and an antisense strand, wherein the sense strand comprises AGCUGGAGCCUUCCUAACC (SEQ ID NO: 5668) or a nucleic acid sequence thereof having about 1 or 2 nucleoside substitutions, additions, or deletions; and the antisense strand comprises GGUUAGGAAGGCUCCAGCU (SEQ ID NO: 5769) or a nucleic acid sequence thereof having about 1 or 2 nucleoside substitutions, additions, or deletions. 510. A pharmaceutical composition comprising a sense strand and an antisense strand, wherein the sense strand comprises AGCUGGAGCCUUCCUAACA (SEQ ID NO: 5870) or a nucleic acid sequence thereof having about 1 or 2 nucleoside substitutions, additions, or deletions; and the antisense strand comprises UGUUAGGAAGGCUCCAGCU (SEQ ID NO: 5971) or a nucleic acid sequence thereof having about 1 or 2 nucleoside substitutions, additions, or deletions. 511. A pharmaceutical composition comprising a sense strand and an antisense strand, wherein the sense strand comprises mAsmGsmCmUfGmGfAfGfCmCmUmUmCmCmUmAmAmCmAsmUsmU (SEQ ID NO: 5566) or a nucleic acid sequence thereof having about 1 or 2 nucleoside substitutions, additions, or deletions; and the antisense strand comprises mUsfGsmUmUmAfGmGmAmAmGmGmCmUfCmCfAmGmCmUsmUsmU (SEQ ID NO: 5567) or a nucleic acid sequence thereof having about 1 or 2 nucleoside substitutions, additions, or deletions.

[0317] 512. A pharmaceutical composition comprising a sense strand and an antisense strand, wherein the sense strand comprises SEQ ID NO: 23, the first 19 nucleobases of SEQ ID NO: 23, or a nucleic acid sequence thereof having about 1 or 2 nucleoside substitutions, additions, or deletions, and the antisense strand comprises SEQ ID NO: 24, the first 19 nucleobases of SEQ ID NO: 24, or a nucleic acid sequence thereof having about 1 or 2 nucleoside substitutions, additions, or deletions; or the sense strand comprises SEQ ID NO: 5366 or a nucleic acid sequence thereof having about 1 or 2 nucleoside substitutions, additions, or deletions, and the antisense strand comprises SEQ ID NO: 5367 or a nucleic acid sequence thereof having about 1 or 2 nucleoside substitutions, additions, or deletions. 513. A pharmaceutical composition comprising a sense strand and an antisense strand, wherein the sense strand comprises SEQ ID NO: 31, the first 19 nucleobases of SEQ ID NO: 31, or a nucleic acid sequence thereof having about 1 or 2 nucleoside substitutions, additions, or deletions, and the antisense strand comprises SEQ ID NO: 32, the first 19 nucleobases of SEQ ID NO: 32, or a nucleic acid sequence thereof having about 1 or 2 nucleoside substitutions, additions, or deletions; or the sense strand comprises SEQ ID NO: 5368 or a nucleic acid sequence thereof having about 1 or 2 nucleoside substitutions, additions, or deletions, and the antisense strand comprises SEQ ID NO: 5369 or a nucleic acid sequence thereof having about 1 or 2 nucleoside substitutions, additions, or deletions. 514. A pharmaceutical composition comprising a sense strand and an antisense strand, wherein the sense strand comprises SEQ ID NO: 33, the first 19 nucleobases of SEQ ID NO: 33, or a nucleic acid sequence thereof having about 1 or 2 nucleoside substitutions, additions, or deletions, and the antisense strand comprises SEQ ID NO: 34, the first 19 nucleobases of SEQ ID NO: 34, or a nucleic acid sequence thereof having about 1 or 2 nucleoside substitutions, additions, or deletions; or the sense strand comprises SEQ ID NO: 5370 or a nucleic acid sequence thereof having about 1 or 2 nucleoside substitutions, additions, or deletions, and the antisense strand comprises SEQ ID NO: 5371 or a nucleic acid sequence thereof having about 1 or 2 nucleoside substitutions, additions, or deletions. 515. A pharmaceutical composition comprising a sense strand and an antisense strand, wherein the sense strand comprises SEQ ID NO: 37, the first 19 nucleobases of SEQ ID NO: 37, or a nucleic acid sequence thereof having about 1 or 2 nucleoside substitutions, additions, or deletions, and the antisense strand comprises SEQ ID NO: 38, the first 19 nucleobases of SEQ ID NO: 38, or a nucleic acid sequence thereof having about 1 or 2 nucleoside substitutions, additions, or deletions; or the sense strand comprises SEQ ID NO: 5372 or a nucleic acid sequence thereof having about 1 or 2 nucleoside substitutions, additions, or deletions, and the antisense strand comprises SEQ ID NO: 5373 or a nucleic acid sequence thereof having about 1 or 2 nucleoside substitutions, additions, or deletions. 516. A pharmaceutical composition comprising a sense strand and an antisense strand, wherein the sense strand comprises SEQ ID NO: 39, the first 19 nucleobases of SEQ ID NO: 39, or a nucleic acid sequence thereof having about 1 or 2 nucleoside substitutions, additions, or deletions, and the antisense strand comprises SEQ ID NO: 40, the first 19 nucleobases of SEQ ID NO: 40, or a nucleic acid sequence thereof having about 1 or 2 nucleoside substitutions, additions, or deletions; or the sense strand comprises SEQ ID NO: 5374 or a nucleic acid sequence thereof having about 1 or 2 nucleoside substitutions, additions, or deletions, and the antisense strand comprises SEQ ID NO: 5375 or a nucleic acid sequence thereof having about 1 or 2 nucleoside substitutions, additions, or deletions. 517. A pharmaceutical composition comprising a sense strand and an antisense strand, wherein the sense strand comprises SEQ ID NO: 41, the first 19 nucleobases of SEQ ID NO: 41, or a nucleic acid sequence thereof having about 1 or 2 nucleoside substitutions, additions, or deletions, and the antisense strand comprises SEQ ID NO: 42, the first 19 nucleobases of SEQ ID NO: 42, or a nucleic acid sequence thereof having about 1 or 2 nucleoside substitutions, additions, or deletions; or the sense strand comprises SEQ ID NO: 5376 or a nucleic acid sequence thereof having about 1 or 2 nucleoside substitutions, additions, or deletions, and the antisense strand comprises SEQ ID NO: 5377 or a nucleic acid sequence thereof having about 1 or 2 nucleoside substitutions, additions, or deletions. 518. A pharmaceutical composition comprising a sense strand and an antisense strand, wherein the sense strand comprises SEQ ID NO: 43, the first 19 nucleobases of SEQ ID NO: 43, or a nucleic acid sequence thereof having about 1 or 2 nucleoside substitutions, additions, or deletions, and the antisense strand comprises SEQ ID NO: 44, the first 19 nucleobases of SEQ ID NO: 44, or a nucleic acid sequence thereof having about 1 or 2 nucleoside substitutions, additions, or deletions; or the sense strand comprises SEQ ID NO: 5378 or a nucleic acid sequence thereof having about 1 or 2 nucleoside substitutions, additions, or deletions, and the antisense strand comprises SEQ ID NO: 5379 or a nucleic acid sequence thereof having about 1 or 2 nucleoside substitutions, additions, or deletions. 519. A pharmaceutical composition comprising a sense strand and an antisense strand, wherein the sense strand comprises SEQ ID NO: 51, the first 19 nucleobases of SEQ ID NO: 51, or a nucleic acid sequence thereof having about 1 or 2 nucleoside substitutions, additions, or deletions, and the antisense strand comprises SEQ ID NO: 52, the first 19 nucleobases of SEQ ID NO: 52, or a nucleic acid sequence thereof having about 1 or 2 nucleoside substitutions, additions, or deletions; or the sense strand comprises SEQ ID NO: 5380 or a nucleic acid sequence thereof having about 1 or 2 nucleoside substitutions, additions, or deletions, and the antisense strand comprises SEQ ID NO: 5381 or a nucleic acid sequence thereof having about 1 or 2 nucleoside substitutions, additions, or deletions. 520. A pharmaceutical composition comprising a sense strand and an antisense strand, wherein the sense strand comprises SEQ ID NO: 195, the first 19 nucleobases of SEQ ID NO: 195, or a nucleic acid sequence thereof having about 1 or 2 nucleoside substitutions, additions, or deletions, and the antisense strand comprises SEQ ID NO: 196, the first 19 nucleobases of SEQ ID NO: 196, or a nucleic acid sequence thereof having about 1 or 2 nucleoside substitutions, additions, or deletions; or the sense strand comprises SEQ ID NO: 5382 or a nucleic acid sequence thereof having about 1 or 2 nucleoside substitutions, additions, or deletions, and the antisense strand comprises SEQ ID NO: 5383 or a nucleic acid sequence thereof having about 1 or 2 nucleoside substitutions, additions, or deletions. 521. A pharmaceutical composition comprising a sense strand and an antisense strand, wherein the sense strand comprises SEQ ID NO: 197, the first 19 nucleobases of SEQ ID NO: 197, or a nucleic acid sequence thereof having about 1 or 2 nucleoside substitutions, additions, or deletions, and the antisense strand comprises SEQ ID NO: 198, the first 19 nucleobases of SEQ ID NO: 198, or a nucleic acid sequence thereof having about 1 or 2 nucleoside substitutions, additions, or deletions; or the sense strand comprises SEQ ID NO: 5384 or a nucleic acid sequence thereof having about 1 or 2 nucleoside substitutions, additions, or deletions, and the antisense strand comprises SEQ ID NO: 5385 or a nucleic acid sequence thereof having about 1 or 2 nucleoside substitutions, additions, or deletions. 522. A pharmaceutical composition comprising a sense strand and an antisense strand, wherein the sense strand comprises SEQ ID NO: 199, the first 19 nucleobases of SEQ ID NO: 199, or a nucleic acid sequence thereof having about 1 or 2 nucleoside substitutions, additions, or deletions, and the antisense strand comprises SEQ ID NO: 200, the first 19 nucleobases of SEQ ID NO: 200, or a nucleic acid sequence thereof having about 1 or 2 nucleoside substitutions, additions, or deletions; or the sense strand comprises SEQ ID NO: 5386 or a nucleic acid sequence thereof having about 1 or 2 nucleoside substitutions, additions, or deletions, and the antisense strand comprises SEQ ID NO: 5387 or a nucleic acid sequence thereof having about 1 or 2 nucleoside substitutions, additions, or deletions. 523. A pharmaceutical composition comprising a sense strand and an antisense strand, wherein the sense strand comprises SEQ ID NO: 251, the first 19 nucleobases of SEQ ID NO: 251, or a nucleic acid sequence thereof having about 1 or 2 nucleoside substitutions, additions, or deletions, and the antisense strand comprises SEQ ID NO: 252, the first 19 nucleobases of SEQ ID NO: 252, or a nucleic acid sequence thereof having about 1 or 2 nucleoside substitutions, additions, or deletions; or the sense strand comprises SEQ ID NO: 5388 or a nucleic acid sequence thereof having about 1 or 2 nucleoside substitutions, additions, or deletions, and the antisense strand comprises SEQ ID NO: 5389 or a nucleic acid sequence thereof having about 1 or 2 nucleoside substitutions, additions, or deletions. 524. A pharmaceutical composition comprising a sense strand and an antisense strand, wherein the sense strand comprises SEQ ID NO: 257, the first 19 nucleobases of SEQ ID NO: 257, or a nucleic acid sequence thereof having about 1 or 2 nucleoside substitutions, additions, or deletions, and the antisense strand comprises SEQ ID NO: 258, the first 19 nucleobases of SEQ ID NO: 258, or a nucleic acid sequence thereof having about 1 or 2 nucleoside substitutions, additions, or deletions; or the sense strand comprises SEQ ID NO: 5390 or a nucleic acid sequence thereof having about 1 or 2 nucleoside substitutions, additions, or deletions, and the antisense strand comprises SEQ ID NO: 5391 or a nucleic acid sequence thereof having about 1 or 2 nucleoside substitutions, additions, or deletions. 525. A pharmaceutical composition comprising a sense strand and an antisense strand, wherein the sense strand comprises SEQ ID NO: 263, the first 19 nucleobases of SEQ ID NO: 263, or a nucleic acid sequence thereof having about 1 or 2 nucleoside substitutions, additions, or deletions, and the antisense strand comprises SEQ ID NO: 264, the first 19 nucleobases of SEQ ID NO: 264, or a nucleic acid sequence thereof having about 1 or 2 nucleoside substitutions, additions, or deletions; or the sense strand comprises SEQ ID NO: 5392 or a nucleic acid sequence thereof having about 1 or 2 nucleoside substitutions, additions, or deletions, and the antisense strand comprises SEQ ID NO: 5393 or a nucleic acid sequence thereof having about 1 or 2 nucleoside substitutions, additions, or deletions. 526. A pharmaceutical composition comprising a sense strand and an antisense strand, wherein the sense strand comprises SEQ ID NO: 273, the first 19 nucleobases of SEQ ID NO: 273, or a nucleic acid sequence thereof having about 1 or 2 nucleoside substitutions, additions, or deletions, and the antisense strand comprises SEQ ID NO: 274, the first 19 nucleobases of SEQ ID NO: 274, or a nucleic acid sequence thereof having about 1 or 2 nucleoside substitutions, additions, or deletions; or the sense strand comprises SEQ ID NO: 5394 or a nucleic acid sequence thereof having about 1 or 2 nucleoside substitutions, additions, or deletions, and the antisense strand comprises SEQ ID NO: 5395 or a nucleic acid sequence thereof having about 1 or 2 nucleoside substitutions, additions, or deletions. 527. A pharmaceutical composition comprising a sense strand and an antisense strand, wherein the sense strand comprises SEQ ID NO: 275, the first 19 nucleobases of SEQ ID NO: 275, or a nucleic acid sequence thereof having about 1 or 2 nucleoside substitutions, additions, or deletions, and the antisense strand comprises SEQ ID NO: 276, the first 19 nucleobases of SEQ ID NO: 276, or a nucleic acid sequence thereof having about 1 or 2 nucleoside substitutions, additions, or deletions; or the sense strand comprises SEQ ID NO: 5396 or a nucleic acid sequence thereof having about 1 or 2 nucleoside substitutions, additions, or deletions, and the antisense strand comprises SEQ ID NO: 5397 or a nucleic acid sequence thereof having about 1 or 2 nucleoside substitutions, additions, or deletions. 528. A pharmaceutical composition comprising a sense strand and an antisense strand, wherein the sense strand comprises SEQ ID NO: 279, the first 19 nucleobases of SEQ ID NO: 279, or a nucleic acid sequence thereof having about 1 or 2 nucleoside substitutions, additions, or deletions, and the antisense strand comprises SEQ ID NO: 280, the first 19 nucleobases of SEQ ID NO: 280, or a nucleic acid sequence thereof having about 1 or 2 nucleoside substitutions, additions, or deletions; or the sense strand comprises SEQ ID NO: 5398 or a nucleic acid sequence thereof having about 1 or 2 nucleoside substitutions, additions, or deletions, and the antisense strand comprises SEQ ID NO: 5399 or a nucleic acid sequence thereof having about 1 or 2 nucleoside substitutions, additions, or deletions. 529. A pharmaceutical composition comprising a sense strand and an antisense strand, wherein the sense strand comprises SEQ ID NO: 2389, the first 19 nucleobases of SEQ ID NO: 2389, or a nucleic acid sequence thereof having about 1 or 2 nucleoside substitutions, additions, or deletions, and the antisense strand comprises SEQ ID NO: 2390, the first 19 nucleobases of SEQ ID NO: 2390, or a nucleic acid sequence thereof having about 1 or 2 nucleoside substitutions, additions, or deletions; or the sense strand comprises SEQ ID NO: 5400 or a nucleic acid sequence thereof having about 1 or 2 nucleoside substitutions, additions, or deletions, and the antisense strand comprises SEQ ID NO: 5401 or a nucleic acid sequence thereof having about 1 or 2 nucleoside substitutions, additions, or deletions. 530. A pharmaceutical composition comprising a sense strand and an antisense strand, wherein the sense strand comprises SEQ ID NO: 2391, the first 19 nucleobases of SEQ ID NO: 2391, or a nucleic acid sequence thereof having about 1 or 2 nucleoside substitutions, additions, or deletions, and the antisense strand comprises SEQ ID NO: 2392, the first 19 nucleobases of SEQ ID NO: 2392, or a nucleic acid sequence thereof having about 1 or 2 nucleoside substitutions, additions, or deletions; or the sense strand comprises SEQ ID NO: 5402 or a nucleic acid sequence thereof having about 1 or 2 nucleoside substitutions, additions, or deletions, and the antisense strand comprises SEQ ID NO: 5403 or a nucleic acid sequence thereof having about 1 or 2 nucleoside substitutions, additions, or deletions. 531. A pharmaceutical composition comprising a sense strand and an antisense strand, wherein the sense strand comprises SEQ ID NO: 2397, the first 19 nucleobases of SEQ ID NO: 2397, or a nucleic acid sequence thereof having about 1 or 2 nucleoside substitutions, additions, or deletions, and the antisense strand comprises SEQ ID NO: 2398, the first 19 nucleobases of SEQ ID NO: 2398, or a nucleic acid sequence thereof having about 1 or 2 nucleoside substitutions, additions, or deletions; or the sense strand comprises SEQ ID NO: 5404 or a nucleic acid sequence thereof having about 1 or 2 nucleoside substitutions, additions, or deletions, and the antisense strand comprises SEQ ID NO: 5405 or a nucleic acid sequence thereof having about 1 or 2 nucleoside substitutions, additions, or deletions. 532. A pharmaceutical composition comprising a sense strand and an antisense strand, wherein the sense strand comprises SEQ ID NO: 2399, the first 19 nucleobases of SEQ ID NO: 2399, or a nucleic acid sequence thereof having about 1 or 2 nucleoside substitutions, additions, or deletions, and the antisense strand comprises SEQ ID NO: 2400, the first 19 nucleobases of SEQ ID NO: 2400, or a nucleic acid sequence thereof having about 1 or 2 nucleoside substitutions, additions, or deletions; or the sense strand comprises SEQ ID NO: 5406 or a nucleic acid sequence thereof having about 1 or 2 nucleoside substitutions, additions, or deletions, and the antisense strand comprises SEQ ID NO: 5407 or a nucleic acid sequence thereof having about 1 or 2 nucleoside substitutions, additions, or deletions. 533. A pharmaceutical composition comprising a sense strand and an antisense strand, wherein the sense strand comprises SEQ ID NO: 2409, the first 19 nucleobases of SEQ ID NO: 2409, or a nucleic acid sequence thereof having about 1 or 2 nucleoside substitutions, additions, or deletions, and the antisense strand comprises SEQ ID NO: 2410, the first 19 nucleobases of SEQ ID NO: 2410, or a nucleic acid sequence thereof having about 1 or 2 nucleoside substitutions, additions, or deletions; or the sense strand comprises SEQ ID NO: 5408 or a nucleic acid sequence thereof having about 1 or 2 nucleoside substitutions, additions, or deletions, and the antisense strand comprises SEQ ID NO: 5409 or a nucleic acid sequence thereof having about 1 or 2 nucleoside substitutions, additions, or deletions. 534. A pharmaceutical composition comprising a sense strand and an antisense strand, wherein the sense strand comprises SEQ ID NO: 2415, the first 19 nucleobases of SEQ ID NO: 2415, or a nucleic acid sequence thereof having about 1 or 2 nucleoside substitutions, additions, or deletions, and the antisense strand comprises SEQ ID NO: 2416, the first 19 nucleobases of SEQ ID NO: 2416, or a nucleic acid sequence thereof having about 1 or 2 nucleoside substitutions, additions, or deletions; or the sense strand comprises SEQ ID NO: 5410 or a nucleic acid sequence thereof having about 1 or 2 nucleoside substitutions, additions, or deletions, and the antisense strand comprises SEQ ID NO: 5411 or a nucleic acid sequence thereof having about 1 or 2 nucleoside substitutions, additions, or deletions. 535. A pharmaceutical composition comprising a sense strand and an antisense strand, wherein the sense strand comprises SEQ ID NO: 2419, the first 19 nucleobases of SEQ ID NO: 2419, or a nucleic acid sequence thereof having about 1 or 2 nucleoside substitutions, additions, or deletions, and the antisense strand comprises SEQ ID NO: 2420, the first 19 nucleobases of SEQ ID NO: 2420, or a nucleic acid sequence thereof having about 1 or 2 nucleoside substitutions, additions, or deletions; or the sense strand comprises SEQ ID NO: 5412 or a nucleic acid sequence thereof having about 1 or 2 nucleoside substitutions, additions, or deletions, and the antisense strand comprises SEQ ID NO: 5413 or a nucleic acid sequence thereof having about 1 or 2 nucleoside substitutions, additions, or deletions. 536. A pharmaceutical composition comprising a sense strand and an antisense strand, wherein the sense strand comprises SEQ ID NO: 2421, the first 19 nucleobases of SEQ ID NO: 2421, or a nucleic acid sequence thereof having about 1 or 2 nucleoside substitutions, additions, or deletions, and the antisense strand comprises SEQ ID NO: 2422, the first 19 nucleobases of SEQ ID NO: 2422, or a nucleic acid sequence thereof having about 1 or 2 nucleoside substitutions, additions, or deletions; or the sense strand comprises SEQ ID NO: 5414 or a nucleic acid sequence thereof having about 1 or 2 nucleoside substitutions, additions, or deletions, and the antisense strand comprises SEQ ID NO: 5415 or a nucleic acid sequence thereof having about 1 or 2 nucleoside substitutions, additions, or deletions. 537. A pharmaceutical composition comprising a sense strand and an antisense strand, wherein the sense strand comprises SEQ ID NO: 2423, the first 19 nucleobases of SEQ ID NO: 2423, or a nucleic acid sequence thereof having about 1 or 2 nucleoside substitutions, additions, or deletions, and the antisense strand comprises SEQ ID NO: 2424, the first 19 nucleobases of SEQ ID NO: 2424, or a nucleic acid sequence thereof having about 1 or 2 nucleoside substitutions, additions, or deletions; or the sense strand comprises SEQ ID NO: 5416 or a nucleic acid sequence thereof having about 1 or 2 nucleoside substitutions, additions, or deletions, and the antisense strand comprises SEQ ID NO: 5417 or a nucleic acid sequence thereof having about 1 or 2 nucleoside substitutions, additions, or deletions. 538. A pharmaceutical composition comprising a sense strand and an antisense strand, wherein the sense strand comprises SEQ ID NO: 2425, the first 19 nucleobases of SEQ ID NO: 2425, or a nucleic acid sequence thereof having about 1 or 2 nucleoside substitutions, additions, or deletions, and the antisense strand comprises SEQ ID NO: 2426, the first 19 nucleobases of SEQ ID NO: 2426, or a nucleic acid sequence thereof having about 1 or 2 nucleoside substitutions, additions, or deletions; or the sense strand comprises SEQ ID NO: 5418 or a nucleic acid sequence thereof having about 1 or 2 nucleoside substitutions, additions, or deletions, and the antisense strand comprises SEQ ID NO: 5419 or a nucleic acid sequence thereof having about 1 or 2 nucleoside substitutions, additions, or deletions. 539. A pharmaceutical composition comprising a sense strand and an antisense strand, wherein the sense strand comprises SEQ ID NO: 2427, the first 19 nucleobases of SEQ ID NO: 2427, or a nucleic acid sequence thereof having about 1 or 2 nucleoside substitutions, additions, or deletions, and the antisense strand comprises SEQ ID NO: 2428, the first 19 nucleobases of SEQ ID NO: 2428, or a nucleic acid sequence thereof having about 1 or 2 nucleoside substitutions, additions, or deletions; or the sense strand comprises SEQ ID NO: 5420 or a nucleic acid sequence thereof having about 1 or 2 nucleoside substitutions, additions, or deletions, and the antisense strand comprises SEQ ID NO: 5421 or a nucleic acid sequence thereof having about 1 or 2 nucleoside substitutions, additions, or deletions. 540. A pharmaceutical composition comprising a sense strand and an antisense strand, wherein the sense strand comprises SEQ ID NO: 2431, the first 19 nucleobases of SEQ ID NO: 2431, or a nucleic acid sequence thereof having about 1 or 2 nucleoside substitutions, additions, or deletions, and the antisense strand comprises SEQ ID NO: 2432, the first 19 nucleobases of SEQ ID NO: 2432, or a nucleic acid sequence thereof having about 1 or 2 nucleoside substitutions, additions, or deletions; or the sense strand comprises SEQ ID NO: 5422 or a nucleic acid sequence thereof having about 1 or 2 nucleoside substitutions, additions, or deletions, and the antisense strand comprises SEQ ID NO: 5423 or a nucleic acid sequence thereof having about 1 or 2 nucleoside substitutions, additions, or deletions. 541. A pharmaceutical composition comprising a sense strand and an antisense strand, wherein the sense strand comprises SEQ ID NO: 2437, the first 19 nucleobases of SEQ ID NO: 2437, or a nucleic acid sequence thereof having about 1 or 2 nucleoside substitutions, additions, or deletions, and the antisense strand comprises SEQ ID NO: 2438, the first 19 nucleobases of SEQ ID NO: 2438, or a nucleic acid sequence thereof having about 1 or 2 nucleoside substitutions, additions, or deletions; or the sense strand comprises SEQ ID NO: 5424 or a nucleic acid sequence thereof having about 1 or 2 nucleoside substitutions, additions, or deletions, and the antisense strand comprises SEQ ID NO: 5425 or a nucleic acid sequence thereof having about 1 or 2 nucleoside substitutions, additions, or deletions. 542. A pharmaceutical composition comprising a sense strand and an antisense strand, wherein the sense strand comprises SEQ ID NO: 2439, the first 19 nucleobases of SEQ ID NO: 2439, or a nucleic acid sequence thereof having about 1 or 2 nucleoside substitutions, additions, or deletions, and the antisense strand comprises SEQ ID NO: 2440, the first 19 nucleobases of SEQ ID NO: 2440, or a nucleic acid sequence thereof having about 1 or 2 nucleoside substitutions, additions, or deletions; or the sense strand comprises SEQ ID NO: 5426 or a nucleic acid sequence thereof having about 1 or 2 nucleoside substitutions, additions, or deletions, and the antisense strand comprises SEQ ID NO: 5427 or a nucleic acid sequence thereof having about 1 or 2 nucleoside substitutions, additions, or deletions. 543. A pharmaceutical composition comprising a sense strand and an antisense strand, wherein the sense strand comprises SEQ ID NO: 2769, the first 19 nucleobases of SEQ ID NO: 2769, or a nucleic acid sequence thereof having about 1 or 2 nucleoside substitutions, additions, or deletions, and the antisense strand comprises SEQ ID NO: 2770, the first 19 nucleobases of SEQ ID NO: 2770, or a nucleic acid sequence thereof having about 1 or 2 nucleoside substitutions, additions, or deletions; or the sense strand comprises SEQ ID NO: 5428 or a nucleic acid sequence thereof having about 1 or 2 nucleoside substitutions, additions, or deletions, and the antisense strand comprises SEQ ID NO: 5429 or a nucleic acid sequence thereof having about 1 or 2 nucleoside substitutions, additions, or deletions. 544. A pharmaceutical composition comprising a sense strand and an antisense strand, wherein the sense strand comprises SEQ ID NO: 2771, the first 19 nucleobases of SEQ ID NO: 2771, or a nucleic acid sequence thereof having about 1 or 2 nucleoside substitutions, additions, or deletions, and the antisense strand comprises SEQ ID NO: 2772, the first 19 nucleobases of SEQ ID NO: 2772, or a nucleic acid sequence thereof having about 1 or 2 nucleoside substitutions, additions, or deletions; or the sense strand comprises SEQ ID NO: 5430 or a nucleic acid sequence thereof having about 1 or 2 nucleoside substitutions, additions, or deletions, and the antisense strand comprises SEQ ID NO: 5431 or a nucleic acid sequence thereof having about 1 or 2 nucleoside substitutions, additions, or deletions. 545. A pharmaceutical composition comprising a sense strand and an antisense strand, wherein the sense strand comprises SEQ ID NO: 2773, the first 19 nucleobases of SEQ ID NO: 2773, or a nucleic acid sequence thereof having about 1 or 2 nucleoside substitutions, additions, or deletions, and the antisense strand comprises SEQ ID NO: 2774, the first 19 nucleobases of SEQ ID NO: 2774, or a nucleic acid sequence thereof having about 1 or 2 nucleoside substitutions, additions, or deletions; or the sense strand comprises SEQ ID NO: 5432 or a nucleic acid sequence thereof having about 1 or 2 nucleoside substitutions, additions, or deletions, and the antisense strand comprises SEQ ID NO: 5433 or a nucleic acid sequence thereof having about 1 or 2 nucleoside substitutions, additions, or deletions. 546. A pharmaceutical composition comprising a sense strand and an antisense strand, wherein the sense strand comprises SEQ ID NO: 2881, the first 19 nucleobases of SEQ ID NO: 2881, or a nucleic acid sequence thereof having about 1 or 2 nucleoside substitutions, additions, or deletions, and the antisense strand comprises SEQ ID NO: 2882, the first 19 nucleobases of SEQ ID NO: 2882, or a nucleic acid sequence thereof having about 1 or 2 nucleoside substitutions, additions, or deletions; or the sense strand comprises SEQ ID NO: 5434 or a nucleic acid sequence thereof having about 1 or 2 nucleoside substitutions, additions, or deletions, and the antisense strand comprises SEQ ID NO: 5435 or a nucleic acid sequence thereof having about 1 or 2 nucleoside substitutions, additions, or deletions. 547. A pharmaceutical composition comprising a sense strand and an antisense strand, wherein the sense strand comprises SEQ ID NO: 2899, the first 19 nucleobases of SEQ ID NO: 2899, or a nucleic acid sequence thereof having about 1 or 2 nucleoside substitutions, additions, or deletions, and the antisense strand comprises SEQ ID NO: 2900, the first 19 nucleobases of SEQ ID NO: 2900, or a nucleic acid sequence thereof having about 1 or 2 nucleoside substitutions, additions, or deletions; or the sense strand comprises SEQ ID NO: 5436 or a nucleic acid sequence thereof having about 1 or 2 nucleoside substitutions, additions, or deletions, and the antisense strand comprises SEQ ID NO: 5437 or a nucleic acid sequence thereof having about 1 or 2 nucleoside substitutions, additions, or deletions. 548. A pharmaceutical composition comprising a sense strand and an antisense strand, wherein the sense strand comprises SEQ ID NO: 2903, the first 19 nucleobases of SEQ ID NO: 2903, or a nucleic acid sequence thereof having about 1 or 2 nucleoside substitutions, additions, or deletions, and the antisense strand comprises SEQ ID NO: 2904, the first 19 nucleobases of SEQ ID NO: 2904, or a nucleic acid sequence thereof having about 1 or 2 nucleoside substitutions, additions, or deletions; or the sense strand comprises SEQ ID NO: 5438 or a nucleic acid sequence thereof having about 1 or 2 nucleoside substitutions, additions, or deletions, and the antisense strand comprises SEQ ID NO: 5439 or a nucleic acid sequence thereof having about 1 or 2 nucleoside substitutions, additions, or deletions. 549. A pharmaceutical composition comprising a sense strand and an antisense strand, wherein the sense strand comprises SEQ ID NO: 2905, the first 19 nucleobases of SEQ ID NO: 2905, or a nucleic acid sequence thereof having about 1 or 2 nucleoside substitutions, additions, or deletions, and the antisense strand comprises SEQ ID NO: 2906, the first 19 nucleobases of SEQ ID NO: 2906, or a nucleic acid sequence thereof having about 1 or 2 nucleoside substitutions, additions, or deletions; or the sense strand comprises SEQ ID NO: 5440 or a nucleic acid sequence thereof having about 1 or 2 nucleoside substitutions, additions, or deletions, and the antisense strand comprises SEQ ID NO: 5441 or a nucleic acid sequence thereof having about 1 or 2 nucleoside substitutions, additions, or deletions. 550. A pharmaceutical composition comprising a sense strand and an antisense strand, wherein the sense strand comprises SEQ ID NO: 2909, the first 19 nucleobases of SEQ ID NO: 2909, or a nucleic acid sequence thereof having about 1 or 2 nucleoside substitutions, additions, or deletions, and the antisense strand comprises SEQ ID NO: 2910, the first 19 nucleobases of SEQ ID NO: 2910, or a nucleic acid sequence thereof having about 1 or 2 nucleoside substitutions, additions, or deletions; or the sense strand comprises SEQ ID NO: 5442 or a nucleic acid sequence thereof having about 1 or 2 nucleoside substitutions, additions, or deletions, and the antisense strand comprises SEQ ID NO: 5443 or a nucleic acid sequence thereof having about 1 or 2 nucleoside substitutions, additions, or deletions. 551. A pharmaceutical composition comprising a sense strand and an antisense strand, wherein the sense strand comprises SEQ ID NO: 2913, the first 19 nucleobases of SEQ ID NO: 2913, or a nucleic acid sequence thereof having about 1 or 2 nucleoside substitutions, additions, or deletions, and the antisense strand comprises SEQ ID NO: 2914, the first 19 nucleobases of SEQ ID NO: 2914, or a nucleic acid sequence thereof having about 1 or 2 nucleoside substitutions, additions, or deletions; or the sense strand comprises SEQ ID NO: 5444 or a nucleic acid sequence thereof having about 1 or 2 nucleoside substitutions, additions, or deletions, and the antisense strand comprises SEQ ID NO: 5445 or a nucleic acid sequence thereof having about 1 or 2 nucleoside substitutions, additions, or deletions. 552. A pharmaceutical composition comprising a sense strand and an antisense strand, wherein the sense strand comprises SEQ ID NO: 2915, the first 19 nucleobases of SEQ ID NO: 2915, or a nucleic acid sequence thereof having about 1 or 2 nucleoside substitutions, additions, or deletions, and the antisense strand comprises SEQ ID NO: 2916, the first 19 nucleobases of SEQ ID NO: 2916, or a nucleic acid sequence thereof having about 1 or 2 nucleoside substitutions, additions, or deletions; or the sense strand comprises SEQ ID NO: 5446 or a nucleic acid sequence thereof having about 1 or 2 nucleoside substitutions, additions, or deletions, and the antisense strand comprises SEQ ID NO: 5447 or a nucleic acid sequence thereof having about 1 or 2 nucleoside substitutions, additions, or deletions. 553. A pharmaceutical composition comprising a sense strand and an antisense strand, wherein the sense strand comprises SEQ ID NO: 3013, the first 19 nucleobases of SEQ ID NO: 3013, or a nucleic acid sequence thereof having about 1 or 2 nucleoside substitutions, additions, or deletions, and the antisense strand comprises SEQ ID NO: 3014, the first 19 nucleobases of SEQ ID NO: 3014, or a nucleic acid sequence thereof having about 1 or 2 nucleoside substitutions, additions, or deletions; or the sense strand comprises SEQ ID NO: 5448 or a nucleic acid sequence thereof having about 1 or 2 nucleoside substitutions, additions, or deletions, and the antisense strand comprises SEQ ID NO: 5449 or a nucleic acid sequence thereof having about 1 or 2 nucleoside substitutions, additions, or deletions. 554. A pharmaceutical composition comprising a sense strand and an antisense strand, wherein the sense strand comprises SEQ ID NO: 3015, the first 19 nucleobases of SEQ ID NO: 3015, or a nucleic acid sequence thereof having about 1 or 2 nucleoside substitutions, additions, or deletions, and the antisense strand comprises SEQ ID NO: 3016, the first 19 nucleobases of SEQ ID NO: 3016, or a nucleic acid sequence thereof having about 1 or 2 nucleoside substitutions, additions, or deletions; or the sense strand comprises SEQ ID NO: 5450 or a nucleic acid sequence thereof having about 1 or 2 nucleoside substitutions, additions, or deletions, and the antisense strand comprises SEQ ID NO: 5451 or a nucleic acid sequence thereof having about 1 or 2 nucleoside substitutions, additions, or deletions. 555. A pharmaceutical composition comprising a sense strand and an antisense strand, wherein the sense strand comprises SEQ ID NO: 3017, the first 19 nucleobases of SEQ ID NO: 3017, or a nucleic acid sequence thereof having about 1 or 2 nucleoside substitutions, additions, or deletions, and the antisense strand comprises SEQ ID NO: 3018, the first 19 nucleobases of SEQ ID NO: 3018, or a nucleic acid sequence thereof having about 1 or 2 nucleoside substitutions, additions, or deletions; or the sense strand comprises SEQ ID NO: 5452 or a nucleic acid sequence thereof having about 1 or 2 nucleoside substitutions, additions, or deletions, and the antisense strand comprises SEQ ID NO: 5453 or a nucleic acid sequence thereof having about 1 or 2 nucleoside substitutions, additions, or deletions. 556. A pharmaceutical composition comprising a sense strand and an antisense strand, wherein the sense strand comprises SEQ ID NO: 3019, the first 19 nucleobases of SEQ ID NO: 3019, or a nucleic acid sequence thereof having about 1 or 2 nucleoside substitutions, additions, or deletions, and the antisense strand comprises SEQ ID NO: 3020, the first 19 nucleobases of SEQ ID NO: 3020, or a nucleic acid sequence thereof having about 1 or 2 nucleoside substitutions, additions, or deletions; or the sense strand comprises SEQ ID NO: 5454 or a nucleic acid sequence thereof having about 1 or 2 nucleoside substitutions, additions, or deletions, and the antisense strand comprises SEQ ID NO: 5455 or a nucleic acid sequence thereof having about 1 or 2 nucleoside substitutions, additions, or deletions. 557. A pharmaceutical composition comprising a sense strand and an antisense strand, wherein the sense strand comprises SEQ ID NO: 3027, the first 19 nucleobases of SEQ ID NO: 3027, or a nucleic acid sequence thereof having about 1 or 2 nucleoside substitutions, additions, or deletions, and the antisense strand comprises SEQ ID NO: 3028, the first 19 nucleobases of SEQ ID NO: 3028, or a nucleic acid sequence thereof having about 1 or 2 nucleoside substitutions, additions, or deletions; or the sense strand comprises SEQ ID NO: 5456 or a nucleic acid sequence thereof having about 1 or 2 nucleoside substitutions, additions, or deletions, and the antisense strand comprises SEQ ID NO: 5457 or a nucleic acid sequence thereof having about 1 or 2 nucleoside substitutions, additions, or deletions. 558. A pharmaceutical composition comprising a sense strand and an antisense strand, wherein the sense strand comprises SEQ ID NO: 3029, the first 19 nucleobases of SEQ ID NO: 3029, or a nucleic acid sequence thereof having about 1 or 2 nucleoside substitutions, additions, or deletions, and the antisense strand comprises SEQ ID NO: 3030, the first 19 nucleobases of SEQ ID NO: 3030, or a nucleic acid sequence thereof having about 1 or 2 nucleoside substitutions, additions, or deletions; or the sense strand comprises SEQ ID NO: 5458 or a nucleic acid sequence thereof having about 1 or 2 nucleoside substitutions, additions, or deletions, and the antisense strand comprises SEQ ID NO: 5459 or a nucleic acid sequence thereof having about 1 or 2 nucleoside substitutions, additions, or deletions. 559. A pharmaceutical composition comprising a sense strand and an antisense strand, wherein the sense strand comprises SEQ ID NO: 3037, the first 19 nucleobases of SEQ ID NO: 3037, or a nucleic acid sequence thereof having about 1 or 2 nucleoside substitutions, additions, or deletions, and the antisense strand comprises SEQ ID NO: 3038, the first 19 nucleobases of SEQ ID NO: 3038, or a nucleic acid sequence thereof having about 1 or 2 nucleoside substitutions, additions, or deletions; or the sense strand comprises SEQ ID NO: 5460 or a nucleic acid sequence thereof having about 1 or 2 nucleoside substitutions, additions, or deletions, and the antisense strand comprises SEQ ID NO: 5461 or a nucleic acid sequence thereof having about 1 or 2 nucleoside substitutions, additions, or deletions. 560. A pharmaceutical composition comprising a sense strand and an antisense strand, wherein the sense strand comprises SEQ ID NO: 3039, the first 19 nucleobases of SEQ ID NO: 3039, or a nucleic acid sequence thereof having about 1 or 2 nucleoside substitutions, additions, or deletions, and the antisense strand comprises SEQ ID NO: 3040, the first 19 nucleobases of SEQ ID NO: 3040, or a nucleic acid sequence thereof having about 1 or 2 nucleoside substitutions, additions, or deletions; or the sense strand comprises SEQ ID NO: 5462 or a nucleic acid sequence thereof having about 1 or 2 nucleoside substitutions, additions, or deletions, and the antisense strand comprises SEQ ID NO: 5463 or a nucleic acid sequence thereof having about 1 or 2 nucleoside substitutions, additions, or deletions. 561. A pharmaceutical composition comprising a sense strand and an antisense strand, wherein the sense strand comprises SEQ ID NO: 3041, the first 19 nucleobases of SEQ ID NO: 3041, or a nucleic acid sequence thereof having about 1 or 2 nucleoside substitutions, additions, or deletions, and the antisense strand comprises SEQ ID NO: 3042, the first 19 nucleobases of SEQ ID NO: 3042, or a nucleic acid sequence thereof having about 1 or 2 nucleoside substitutions, additions, or deletions; or the sense strand comprises SEQ ID NO: 5464 or a nucleic acid sequence thereof having about 1 or 2 nucleoside substitutions, additions, or deletions, and the antisense strand comprises SEQ ID NO: 5465 or a nucleic acid sequence thereof having about 1 or 2 nucleoside substitutions, additions, or deletions. 562. A pharmaceutical composition comprising a sense strand and an antisense strand, wherein the sense strand comprises SEQ ID NO: 3047, the first 19 nucleobases of SEQ ID NO: 3047, or a nucleic acid sequence thereof having about 1 or 2 nucleoside substitutions, additions, or deletions, and the antisense strand comprises SEQ ID NO: 3048, the first 19 nucleobases of SEQ ID NO: 3048, or a nucleic acid sequence thereof having about 1 or 2 nucleoside substitutions, additions, or deletions; or the sense strand comprises SEQ ID NO: 5466 or a nucleic acid sequence thereof having about 1 or 2 nucleoside substitutions, additions, or deletions, and the antisense strand comprises SEQ ID NO: 5467 or a nucleic acid sequence thereof having about 1 or 2 nucleoside substitutions, additions, or deletions. 563. A pharmaceutical composition comprising a sense strand and an antisense strand, wherein the sense strand comprises SEQ ID NO: 3053, the first 19 nucleobases of SEQ ID NO: 3053, or a nucleic acid sequence thereof having about 1 or 2 nucleoside substitutions, additions, or deletions, and the antisense strand comprises SEQ ID NO: 3054, the first 19 nucleobases of SEQ ID NO: 3054, or a nucleic acid sequence thereof having about 1 or 2 nucleoside substitutions, additions, or deletions; or the sense strand comprises SEQ ID NO: 5468 or a nucleic acid sequence thereof having about 1 or 2 nucleoside substitutions, additions, or deletions, and the antisense strand comprises SEQ ID NO: 5469 or a nucleic acid sequence thereof having about 1 or 2 nucleoside substitutions, additions, or deletions. 564. A pharmaceutical composition comprising a sense strand and an antisense strand, wherein the sense strand comprises SEQ ID NO: 3055, the first 19 nucleobases of SEQ ID NO: 3055, or a nucleic acid sequence thereof having about 1 or 2 nucleoside substitutions, additions, or deletions, and the antisense strand comprises SEQ ID NO: 3056, the first 19 nucleobases of SEQ ID NO: 3056, or a nucleic acid sequence thereof having about 1 or 2 nucleoside substitutions, additions, or deletions; or the sense strand comprises SEQ ID NO: 5470 or a nucleic acid sequence thereof having about 1 or 2 nucleoside substitutions, additions, or deletions, and the antisense strand comprises SEQ ID NO: 5471 or a nucleic acid sequence thereof having about 1 or 2 nucleoside substitutions, additions, or deletions. 565. A pharmaceutical composition comprising a sense strand and an antisense strand, wherein the sense strand comprises SEQ ID NO: 3063, the first 19 nucleobases of SEQ ID NO: 3063, or a nucleic acid sequence thereof having about 1 or 2 nucleoside substitutions, additions, or deletions, and the antisense strand comprises SEQ ID NO: 3064, the first 19 nucleobases of SEQ ID NO: 3064, or a nucleic acid sequence thereof having about 1 or 2 nucleoside substitutions, additions, or deletions; or the sense strand comprises SEQ ID NO: 5472 or a nucleic acid sequence thereof having about 1 or 2 nucleoside substitutions, additions, or deletions, and the antisense strand comprises SEQ ID NO: 5473 or a nucleic acid sequence thereof having about 1 or 2 nucleoside substitutions, additions, or deletions. 566. A pharmaceutical composition comprising a sense strand and an antisense strand, wherein the sense strand comprises SEQ ID NO: 3065, the first 19 nucleobases of SEQ ID NO: 3065, or a nucleic acid sequence thereof having about 1 or 2 nucleoside substitutions, additions, or deletions, and the antisense strand comprises SEQ ID NO: 3066, the first 19 nucleobases of SEQ ID NO: 3066, or a nucleic acid sequence thereof having about 1 or 2 nucleoside substitutions, additions, or deletions; or the sense strand comprises SEQ ID NO: 5474 or a nucleic acid sequence thereof having about 1 or 2 nucleoside substitutions, additions, or deletions, and the antisense strand comprises SEQ ID NO: 5475 or a nucleic acid sequence thereof having about 1 or 2 nucleoside substitutions, additions, or deletions. 567. A pharmaceutical composition comprising a sense strand and an antisense strand, wherein the sense strand comprises SEQ ID NO: 3183, the first 19 nucleobases of SEQ ID NO: 3183, or a nucleic acid sequence thereof having about 1 or 2 nucleoside substitutions, additions, or deletions, and the antisense strand comprises SEQ ID NO: 3184, the first 19 nucleobases of SEQ ID NO: 3184, or a nucleic acid sequence thereof having about 1 or 2 nucleoside substitutions, additions, or deletions; or the sense strand comprises SEQ ID NO: 5476 or a nucleic acid sequence thereof having about 1 or 2 nucleoside substitutions, additions, or deletions, and the antisense strand comprises SEQ ID NO: 5477 or a nucleic acid sequence thereof having about 1 or 2 nucleoside substitutions, additions, or deletions. 568. A pharmaceutical composition comprising a sense strand and an antisense strand, wherein the sense strand comprises SEQ ID NO: 3231, the first 19 nucleobases of SEQ ID NO: 3231, or a nucleic acid sequence thereof having about 1 or 2 nucleoside substitutions, additions, or deletions, and the antisense strand comprises SEQ ID NO: 3232, the first 19 nucleobases of SEQ ID NO: 3232, or a nucleic acid sequence thereof having about 1 or 2 nucleoside substitutions, additions, or deletions; or the sense strand comprises SEQ ID NO: 5478 or a nucleic acid sequence thereof having about 1 or 2 nucleoside substitutions, additions, or deletions, and the antisense strand comprises SEQ ID NO: 5479 or a nucleic acid sequence thereof having about 1 or 2 nucleoside substitutions, additions, or deletions. 569. A pharmaceutical composition comprising a sense strand and an antisense strand, wherein the sense strand comprises SEQ ID NO: 3233, the first 19 nucleobases of SEQ ID NO: 3233, or a nucleic acid sequence thereof having about 1 or 2 nucleoside substitutions, additions, or deletions, and the antisense strand comprises SEQ ID NO: 3234, the first 19 nucleobases of SEQ ID NO: 3234, or a nucleic acid sequence thereof having about 1 or 2 nucleoside substitutions, additions, or deletions; or the sense strand comprises SEQ ID NO: 5480 or a nucleic acid sequence thereof having about 1 or 2 nucleoside substitutions, additions, or deletions, and the antisense strand comprises SEQ ID NO: 5481 or a nucleic acid sequence thereof having about 1 or 2 nucleoside substitutions, additions, or deletions. 570. A pharmaceutical composition comprising a sense strand and an antisense strand, wherein the sense strand comprises SEQ ID NO: 3243, the first 19 nucleobases of SEQ ID NO: 3243, or a nucleic acid sequence thereof having about 1 or 2 nucleoside substitutions, additions, or deletions, and the antisense strand comprises SEQ ID NO: 3244, the first 19 nucleobases of SEQ ID NO: 3244, or a nucleic acid sequence thereof having about 1 or 2 nucleoside substitutions, additions, or deletions; or the sense strand comprises SEQ ID NO: 5482 or a nucleic acid sequence thereof having about 1 or 2 nucleoside substitutions, additions, or deletions, and the antisense strand comprises SEQ ID NO: 5483 or a nucleic acid sequence thereof having about 1 or 2 nucleoside substitutions, additions, or deletions. 571. A pharmaceutical composition comprising a sense strand and an antisense strand, wherein the sense strand comprises SEQ ID NO: 3439, the first 19 nucleobases of SEQ ID NO: 3439, or a nucleic acid sequence thereof having about 1 or 2 nucleoside substitutions, additions, or deletions, and the antisense strand comprises SEQ ID NO: 3440, the first 19 nucleobases of SEQ ID NO: 3440, or a nucleic acid sequence thereof having about 1 or 2 nucleoside substitutions, additions, or deletions; or the sense strand comprises SEQ ID NO: 5484 or a nucleic acid sequence thereof having about 1 or 2 nucleoside substitutions, additions, or deletions, and the antisense strand comprises SEQ ID NO: 5485 or a nucleic acid sequence thereof having about 1 or 2 nucleoside substitutions, additions, or deletions. 572. A pharmaceutical composition comprising a sense strand and an antisense strand, wherein the sense strand comprises SEQ ID NO: 3443, the first 19 nucleobases of SEQ ID NO: 3443, or a nucleic acid sequence thereof having about 1 or 2 nucleoside substitutions, additions, or deletions, and the antisense strand comprises SEQ ID NO: 3444, the first 19 nucleobases of SEQ ID NO: 3444, or a nucleic acid sequence thereof having about 1 or 2 nucleoside substitutions, additions, or deletions; or the sense strand comprises SEQ ID NO: 5486 or a nucleic acid sequence thereof having about 1 or 2 nucleoside substitutions, additions, or deletions, and the antisense strand comprises SEQ ID NO: 5487 or a nucleic acid sequence thereof having about 1 or 2 nucleoside substitutions, additions, or deletions. 573. A pharmaceutical composition comprising a sense strand and an antisense strand, wherein the sense strand comprises SEQ ID NO: 3449, the first 19 nucleobases of SEQ ID NO: 3449, or a nucleic acid sequence thereof having about 1 or 2 nucleoside substitutions, additions, or deletions, and the antisense strand comprises SEQ ID NO: 3450, the first 19 nucleobases of SEQ ID NO: 3450, or a nucleic acid sequence thereof having about 1 or 2 nucleoside substitutions, additions, or deletions; or the sense strand comprises SEQ ID NO: 5488 or a nucleic acid sequence thereof having about 1 or 2 nucleoside substitutions, additions, or deletions, and the antisense strand comprises SEQ ID NO: 5489 or a nucleic acid sequence thereof having about 1 or 2 nucleoside substitutions, additions, or deletions. 574. A pharmaceutical composition comprising a sense strand and an antisense strand, wherein the sense strand comprises SEQ ID NO: 3457, the first 19 nucleobases of SEQ ID NO: 3457, or a nucleic acid sequence thereof having about 1 or 2 nucleoside substitutions, additions, or deletions, and the antisense strand comprises SEQ ID NO: 3458, the first 19 nucleobases of SEQ ID NO: 3458, or a nucleic acid sequence thereof having about 1 or 2 nucleoside substitutions, additions, or deletions; or the sense strand comprises SEQ ID NO: 5490 or a nucleic acid sequence thereof having about 1 or 2 nucleoside substitutions, additions, or deletions, and the antisense strand comprises SEQ ID NO: 5491 or a nucleic acid sequence thereof having about 1 or 2 nucleoside substitutions, additions, or deletions. 575. A pharmaceutical composition comprising a sense strand and an antisense strand, wherein the sense strand comprises SEQ ID NO: 3461, the first 19 nucleobases of SEQ ID NO: 3461, or a nucleic acid sequence thereof having about 1 or 2 nucleoside substitutions, additions, or deletions, and the antisense strand comprises SEQ ID NO: 3462, the first 19 nucleobases of SEQ ID NO: 3462, or a nucleic acid sequence thereof having about 1 or 2 nucleoside substitutions, additions, or deletions; or the sense strand comprises SEQ ID NO: 5492 or a nucleic acid sequence thereof having about 1 or 2 nucleoside substitutions, additions, or deletions, and the antisense strand comprises SEQ ID NO: 5493 or a nucleic acid sequence thereof having about 1 or 2 nucleoside substitutions, additions, or deletions. 576. A pharmaceutical composition comprising a sense strand and an antisense strand, wherein the sense strand comprises SEQ ID NO: 3463, the first 19 nucleobases of SEQ ID NO: 3463, or a nucleic acid sequence thereof having about 1 or 2 nucleoside substitutions, additions, or deletions, and the antisense strand comprises SEQ ID NO: 3464, the first 19 nucleobases of SEQ ID NO: 3464, or a nucleic acid sequence thereof having about 1 or 2 nucleoside substitutions, additions, or deletions; or the sense strand comprises SEQ ID NO: 5494 or a nucleic acid sequence thereof having about 1 or 2 nucleoside substitutions, additions, or deletions, and the antisense strand comprises SEQ ID NO: 5495 or a nucleic acid sequence thereof having about 1 or 2 nucleoside substitutions, additions, or deletions. 577. A pharmaceutical composition comprising a sense strand and an antisense strand, wherein the sense strand comprises SEQ ID NO: 3573, the first 19 nucleobases of SEQ ID NO: 3573, or a nucleic acid sequence thereof having about 1 or 2 nucleoside substitutions, additions, or deletions, and the antisense strand comprises SEQ ID NO: 3574, the first 19 nucleobases of SEQ ID NO: 3574, or a nucleic acid sequence thereof having about 1 or 2 nucleoside substitutions, additions, or deletions; or the sense strand comprises SEQ ID NO: 5496 or a nucleic acid sequence thereof having about 1 or 2 nucleoside substitutions, additions, or deletions, and the antisense strand comprises SEQ ID NO: 5497 or a nucleic acid sequence thereof having about 1 or 2 nucleoside substitutions, additions, or deletions. 578. A pharmaceutical composition comprising a sense strand and an antisense strand, wherein the sense strand comprises SEQ ID NO: 3703, the first 19 nucleobases of SEQ ID NO: 3703, or a nucleic acid sequence thereof having about 1 or 2 nucleoside substitutions, additions, or deletions, and the antisense strand comprises SEQ ID NO: 3704, the first 19 nucleobases of SEQ ID NO: 3704, or a nucleic acid sequence thereof having about 1 or 2 nucleoside substitutions, additions, or deletions; or the sense strand comprises SEQ ID NO: 5498 or a nucleic acid sequence thereof having about 1 or 2 nucleoside substitutions, additions, or deletions, and the antisense strand comprises SEQ ID NO: 5499 or a nucleic acid sequence thereof having about 1 or 2 nucleoside substitutions, additions, or deletions. 579. A pharmaceutical composition comprising a sense strand and an antisense strand, wherein the sense strand comprises SEQ ID NO: 3705, the first 19 nucleobases of SEQ ID NO: 3705, or a nucleic acid sequence thereof having about 1 or 2 nucleoside substitutions, additions, or deletions, and the antisense strand comprises SEQ ID NO: 3706, the first 19 nucleobases of SEQ ID NO: 3706, or a nucleic acid sequence thereof having about 1 or 2 nucleoside substitutions, additions, or deletions; or the sense strand comprises SEQ ID NO: 5500 or a nucleic acid sequence thereof having about 1 or 2 nucleoside substitutions, additions, or deletions, and the antisense strand comprises SEQ ID NO: 5501 or a nucleic acid sequence thereof having about 1 or 2 nucleoside substitutions, additions, or deletions. 580. A pharmaceutical composition comprising a sense strand and an antisense strand, wherein the sense strand comprises SEQ ID NO: 3875, the first 19 nucleobases of SEQ ID NO: 3875, or a nucleic acid sequence thereof having about 1 or 2 nucleoside substitutions, additions, or deletions, and the antisense strand comprises SEQ ID NO: 3876, the first 19 nucleobases of SEQ ID NO: 3876, or a nucleic acid sequence thereof having about 1 or 2 nucleoside substitutions, additions, or deletions; or the sense strand comprises SEQ ID NO: 5502 or a nucleic acid sequence thereof having about 1 or 2 nucleoside substitutions, additions, or deletions, and the antisense strand comprises SEQ ID NO: 5503 or a nucleic acid sequence thereof having about 1 or 2 nucleoside substitutions, additions, or deletions. 581. A pharmaceutical composition comprising a sense strand and an antisense strand, wherein the sense strand comprises SEQ ID NO: 3889, the first 19 nucleobases of SEQ ID NO: 3889, or a nucleic acid sequence thereof having about 1 or 2 nucleoside substitutions, additions, or deletions, and the antisense strand comprises SEQ ID NO: 3890, the first 19 nucleobases of SEQ ID NO: 3890, or a nucleic acid sequence thereof having about 1 or 2 nucleoside substitutions, additions, or deletions; or the sense strand comprises SEQ ID NO: 5504 or a nucleic acid sequence thereof having about 1 or 2 nucleoside substitutions, additions, or deletions, and the antisense strand comprises SEQ ID NO: 5505 or a nucleic acid sequence thereof having about 1 or 2 nucleoside substitutions, additions, or deletions. 582. A pharmaceutical composition comprising a sense strand and an antisense strand, wherein the sense strand comprises SEQ ID NO: 3981, the first 19 nucleobases of SEQ ID NO: 3981, or a nucleic acid sequence thereof having about 1 or 2 nucleoside substitutions, additions, or deletions, and the antisense strand comprises SEQ ID NO: 3982, the first 19 nucleobases of SEQ ID NO: 3982, or a nucleic acid sequence thereof having about 1 or 2 nucleoside substitutions, additions, or deletions; or the sense strand comprises SEQ ID NO: 5506 or a nucleic acid sequence thereof having about 1 or 2 nucleoside substitutions, additions, or deletions, and the antisense strand comprises SEQ ID NO: 5507 or a nucleic acid sequence thereof having about 1 or 2 nucleoside substitutions, additions, or deletions. 583. A pharmaceutical composition comprising a sense strand and an antisense strand, wherein the sense strand comprises SEQ ID NO: 4089, the first 19 nucleobases of SEQ ID NO: 4089, or a nucleic acid sequence thereof having about 1 or 2 nucleoside substitutions, additions, or deletions, and the antisense strand comprises SEQ ID NO: 4090, the first 19 nucleobases of SEQ ID NO: 4090, or a nucleic acid sequence thereof having about 1 or 2 nucleoside substitutions, additions, or deletions; or the sense strand comprises SEQ ID NO: 5508 or a nucleic acid sequence thereof having about 1 or 2 nucleoside substitutions, additions, or deletions, and the antisense strand comprises SEQ ID NO: 5509 or a nucleic acid sequence thereof having about 1 or 2 nucleoside substitutions, additions, or deletions. 584. A pharmaceutical composition comprising a sense strand and an antisense strand, wherein the sense strand comprises SEQ ID NO: 4265, the first 19 nucleobases of SEQ ID NO: 4265, or a nucleic acid sequence thereof having about 1 or 2 nucleoside substitutions, additions, or deletions, and the antisense strand comprises SEQ ID NO: 4266, the first 19 nucleobases of SEQ ID NO: 4266, or a nucleic acid sequence thereof having about 1 or 2 nucleoside substitutions, additions, or deletions; or the sense strand comprises SEQ ID NO: 5510 or a nucleic acid sequence thereof having about 1 or 2 nucleoside substitutions, additions, or deletions, and the antisense strand comprises SEQ ID NO: 5511 or a nucleic acid sequence thereof having about 1 or 2 nucleoside substitutions, additions, or deletions. 585. A pharmaceutical composition comprising a sense strand and an antisense strand, wherein the sense strand comprises SEQ ID NO: 4321, the first 19 nucleobases of SEQ ID NO: 4321, or a nucleic acid sequence thereof having about 1 or 2 nucleoside substitutions, additions, or deletions, and the antisense strand comprises SEQ ID NO: 4322, the first 19 nucleobases of SEQ ID NO: 4322, or a nucleic acid sequence thereof having about 1 or 2 nucleoside substitutions, additions, or deletions; or the sense strand comprises SEQ ID NO: 5512 or a nucleic acid sequence thereof having about 1 or 2 nucleoside substitutions, additions, or deletions, and the antisense strand comprises SEQ ID NO: 5513 or a nucleic acid sequence thereof having about 1 or 2 nucleoside substitutions, additions, or deletions. 586. A pharmaceutical composition comprising a sense strand and an antisense strand, wherein the sense strand comprises SEQ ID NO: 4339, the first 19 nucleobases of SEQ ID NO: 4339, or a nucleic acid sequence thereof having about 1 or 2 nucleoside substitutions, additions, or deletions, and the antisense strand comprises SEQ ID NO: 4340, the first 19 nucleobases of SEQ ID NO: 4340, or a nucleic acid sequence thereof having about 1 or 2 nucleoside substitutions, additions, or deletions; or the sense strand comprises SEQ ID NO: 5514 or a nucleic acid sequence thereof having about 1 or 2 nucleoside substitutions, additions, or deletions, and the antisense strand comprises SEQ ID NO: 5515 or a nucleic acid sequence thereof having about 1 or 2 nucleoside substitutions, additions, or deletions. 587. A pharmaceutical composition comprising a sense strand and an antisense strand, wherein the sense strand comprises SEQ ID NO: 4347, the first 19 nucleobases of SEQ ID NO: 4347, or a nucleic acid sequence thereof having about 1 or 2 nucleoside substitutions, additions, or deletions, and the antisense strand comprises SEQ ID NO: 4348, the first 19 nucleobases of SEQ ID NO: 4348, or a nucleic acid sequence thereof having about 1 or 2 nucleoside substitutions, additions, or deletions; or the sense strand comprises SEQ ID NO: 5516 or a nucleic acid sequence thereof having about 1 or 2 nucleoside substitutions, additions, or deletions, and the antisense strand comprises SEQ ID NO: 5517 or a nucleic acid sequence thereof having about 1 or 2 nucleoside substitutions, additions, or deletions. 588. A pharmaceutical composition comprising a sense strand and an antisense strand, wherein the sense strand comprises SEQ ID NO: 4507, the first 19 nucleobases of SEQ ID NO: 4507, or a nucleic acid sequence thereof having about 1 or 2 nucleoside substitutions, additions, or deletions, and the antisense strand comprises SEQ ID NO: 4508, the first 19 nucleobases of SEQ ID NO: 4508, or a nucleic acid sequence thereof having about 1 or 2 nucleoside substitutions, additions, or deletions; or the sense strand comprises SEQ ID NO: 5518 or a nucleic acid sequence thereof having about 1 or 2 nucleoside substitutions, additions, or deletions, and the antisense strand comprises SEQ ID NO: 5519 or a nucleic acid sequence thereof having about 1 or 2 nucleoside substitutions, additions, or deletions. 589. A pharmaceutical composition comprising a sense strand and an antisense strand, wherein the sense strand comprises SEQ ID NO: 53, the first 19 nucleobases of SEQ ID NO: 53, or a nucleic acid sequence thereof having about 1 or 2 nucleoside substitutions, additions, or deletions, and the antisense strand comprises SEQ ID NO: 54, the first 19 nucleobases of SEQ ID NO: 54, or a nucleic acid sequence thereof having about 1 or 2 nucleoside substitutions, additions, or deletions; or the sense strand comprises SEQ ID NO: 5520 or a nucleic acid sequence thereof having about 1 or 2 nucleoside substitutions, additions, or deletions, and the antisense strand comprises SEQ ID NO: 5521 or a nucleic acid sequence thereof having about 1 or 2 nucleoside substitutions, additions, or deletions. 590. A pharmaceutical composition comprising a sense strand and an antisense strand, wherein the sense strand comprises SEQ ID NO: 2627, the first 19 nucleobases of SEQ ID NO: 2627, or a nucleic acid sequence thereof having about 1 or 2 nucleoside substitutions, additions, or deletions, and the antisense strand comprises SEQ ID NO: 2628, the first 19 nucleobases of SEQ ID NO: 2628, or a nucleic acid sequence thereof having about 1 or 2 nucleoside substitutions, additions, or deletions; or the sense strand comprises SEQ ID NO: 5522 or a nucleic acid sequence thereof having about 1 or 2 nucleoside substitutions, additions, or deletions, and the antisense strand comprises SEQ ID NO: 5523 or a nucleic acid sequence thereof having about 1 or 2 nucleoside substitutions, additions, or deletions. 591. A pharmaceutical composition comprising a sense strand and an antisense strand, wherein the sense strand comprises SEQ ID NO: 2629, the first 19 nucleobases of SEQ ID NO: 2629, or a nucleic acid sequence thereof having about 1 or 2 nucleoside substitutions, additions, or deletions, and the antisense strand comprises SEQ ID NO: 2630, the first 19 nucleobases of SEQ ID NO: 2630, or a nucleic acid sequence thereof having about 1 or 2 nucleoside substitutions, additions, or deletions; or the sense strand comprises SEQ ID NO: 5524 or a nucleic acid sequence thereof having about 1 or 2 nucleoside substitutions, additions, or deletions, and the antisense strand comprises SEQ ID NO: 5525 or a nucleic acid sequence thereof having about 1 or 2 nucleoside substitutions, additions, or deletions. 592. A pharmaceutical composition comprising a sense strand and an antisense strand, wherein the sense strand comprises SEQ ID NO: 3355, the first 19 nucleobases of SEQ ID NO: 3355, or a nucleic acid sequence thereof having about 1 or 2 nucleoside substitutions, additions, or deletions, and the antisense strand comprises SEQ ID NO: 3356, the first 19 nucleobases of SEQ ID NO: 3356, or a nucleic acid sequence thereof having about 1 or 2 nucleoside substitutions, additions, or deletions; or the sense strand comprises SEQ ID NO: 5526 or a nucleic acid sequence thereof having about 1 or 2 nucleoside substitutions, additions, or deletions, and the antisense strand comprises SEQ ID NO: 5527 or a nucleic acid sequence thereof having about 1 or 2 nucleoside substitutions, additions, or deletions. 593. A pharmaceutical composition comprising a sense strand and an antisense strand, wherein the sense strand comprises SEQ ID NO: 3365, the first 19 nucleobases of SEQ ID NO: 3365, or a nucleic acid sequence thereof having about 1 or 2 nucleoside substitutions, additions, or deletions, and the antisense strand comprises SEQ ID NO: 3366, the first 19 nucleobases of SEQ ID NO: 3366, or a nucleic acid sequence thereof having about 1 or 2 nucleoside substitutions, additions, or deletions; or the sense strand comprises SEQ ID NO: 5528 or a nucleic acid sequence thereof having about 1 or 2 nucleoside substitutions, additions, or deletions, and the antisense strand comprises SEQ ID NO: 5529 or a nucleic acid sequence thereof having about 1 or 2 nucleoside substitutions, additions, or deletions. 594. A pharmaceutical composition comprising a sense strand and an antisense strand, wherein the sense strand comprises SEQ ID NO: 87, the first 19 nucleobases of SEQ ID NO: 87, or a nucleic acid sequence thereof having about 1 or 2 nucleoside substitutions, additions, or deletions, and the antisense strand comprises SEQ ID NO: 88, the first 19 nucleobases of SEQ ID NO: 88, or a nucleic acid sequence thereof having about 1 or 2 nucleoside substitutions, additions, or deletions; or the sense strand comprises SEQ ID NO: 5530 or a nucleic acid sequence thereof having about 1 or 2 nucleoside substitutions, additions, or deletions, and the antisense strand comprises SEQ ID NO: 5531 or a nucleic acid sequence thereof having about 1 or 2 nucleoside substitutions, additions, or deletions. 595. A pharmaceutical composition comprising a sense strand and an antisense strand, wherein the sense strand comprises SEQ ID NO: 2329, the first 19 nucleobases of SEQ ID NO: 2329, or a nucleic acid sequence thereof having about 1 or 2 nucleoside substitutions, additions, or deletions, and the antisense strand comprises SEQ ID NO: 2330, the first 19 nucleobases of SEQ ID NO: 2330, or a nucleic acid sequence thereof having about 1 or 2 nucleoside substitutions, additions, or deletions; or the sense strand comprises SEQ ID NO: 5532 or a nucleic acid sequence thereof having about 1 or 2 nucleoside substitutions, additions, or deletions, and the antisense strand comprises SEQ ID NO: 5533 or a nucleic acid sequence thereof having about 1 or 2 nucleoside substitutions, additions, or deletions. 596. A pharmaceutical composition comprising a sense strand and an antisense strand, wherein the sense strand comprises SEQ ID NO: 2379, the first 19 nucleobases of SEQ ID NO: 2379, or a nucleic acid sequence thereof having about 1 or 2 nucleoside substitutions, additions, or deletions, and the antisense strand comprises SEQ ID NO: 2380, the first 19 nucleobases of SEQ ID NO: 2380, or a nucleic acid sequence thereof having about 1 or 2 nucleoside substitutions, additions, or deletions; or the sense strand comprises SEQ ID NO: 5534 or a nucleic acid sequence thereof having about 1 or 2 nucleoside substitutions, additions, or deletions, and the antisense strand comprises SEQ ID NO: 5535 or a nucleic acid sequence thereof having about 1 or 2 nucleoside substitutions, additions, or deletions. 597. A pharmaceutical composition comprising a sense strand and an antisense strand, wherein the sense strand comprises SEQ ID NO: 2381, the first 19 nucleobases of SEQ ID NO: 2381, or a nucleic acid sequence thereof having about 1 or 2 nucleoside substitutions, additions, or deletions, and the antisense strand comprises SEQ ID NO: 2382, the first 19 nucleobases of SEQ ID NO: 2382, or a nucleic acid sequence thereof having about 1 or 2 nucleoside substitutions, additions, or deletions; or the sense strand comprises SEQ ID NO: 5536 or a nucleic acid sequence thereof having about 1 or 2 nucleoside substitutions, additions, or deletions, and the antisense strand comprises SEQ ID NO: 5537 or a nucleic acid sequence thereof having about 1 or 2 nucleoside substitutions, additions, or deletions. 598. A pharmaceutical composition comprising a sense strand and an antisense strand, wherein the sense strand comprises SEQ ID NO: 2521, the first 19 nucleobases of SEQ ID NO: 2521, or a nucleic acid sequence thereof having about 1 or 2 nucleoside substitutions, additions, or deletions, and the antisense strand comprises SEQ ID NO: 2522, the first 19 nucleobases of SEQ ID NO: 2522, or a nucleic acid sequence thereof having about 1 or 2 nucleoside substitutions, additions, or deletions; or the sense strand comprises SEQ ID NO: 5538 or a nucleic acid sequence thereof having about 1 or 2 nucleoside substitutions, additions, or deletions, and the antisense strand comprises SEQ ID NO: 5539 or a nucleic acid sequence thereof having about 1 or 2 nucleoside substitutions, additions, or deletions. 599. A pharmaceutical composition comprising a sense strand and an antisense strand, wherein the sense strand comprises SEQ ID NO: 2525, the first 19 nucleobases of SEQ ID NO: 2525, or a nucleic acid sequence thereof having about 1 or 2 nucleoside substitutions, additions, or deletions, and the antisense strand comprises SEQ ID NO: 2526, the first 19 nucleobases of SEQ ID NO: 2526, or a nucleic acid sequence thereof having about 1 or 2 nucleoside substitutions, additions, or deletions; or the sense strand comprises SEQ ID NO: 5540 or a nucleic acid sequence thereof having about 1 or 2 nucleoside substitutions, additions, or deletions, and the antisense strand comprises SEQ ID NO: 5541 or a nucleic acid sequence thereof having about 1 or 2 nucleoside substitutions, additions, or deletions. 600. A pharmaceutical composition comprising a sense strand and an antisense strand, wherein the sense strand comprises SEQ ID NO: 2607, the first 19 nucleobases of SEQ ID NO: 2607, or a nucleic acid sequence thereof having about 1 or 2 nucleoside substitutions, additions, or deletions, and the antisense strand comprises SEQ ID NO: 2608, the first 19 nucleobases of SEQ ID NO: 2608, or a nucleic acid sequence thereof having about 1 or 2 nucleoside substitutions, additions, or deletions; or the sense strand comprises SEQ ID NO: 5542 or a nucleic acid sequence thereof having about 1 or 2 nucleoside substitutions, additions, or deletions, and the antisense strand comprises SEQ ID NO: 5543 or a nucleic acid sequence thereof having about 1 or 2 nucleoside substitutions, additions, or deletions. 601. A pharmaceutical composition comprising a sense strand and an antisense strand, wherein the sense strand comprises SEQ ID NO: 3057, the first 19 nucleobases of SEQ ID NO: 3057, or a nucleic acid sequence thereof having about 1 or 2 nucleoside substitutions, additions, or deletions, and the antisense strand comprises SEQ ID NO: 3058, the first 19 nucleobases of SEQ ID NO: 3058, or a nucleic acid sequence thereof having about 1 or 2 nucleoside substitutions, additions, or deletions; or the sense strand comprises SEQ ID NO: 5544 or a nucleic acid sequence thereof having about 1 or 2 nucleoside substitutions, additions, or deletions, and the antisense strand comprises SEQ ID NO: 5545 or a nucleic acid sequence thereof having about 1 or 2 nucleoside substitutions, additions, or deletions. 602. A pharmaceutical composition comprising a sense strand and an antisense strand, wherein the sense strand comprises SEQ ID NO: 3061, the first 19 nucleobases of SEQ ID NO: 3061, or a nucleic acid sequence thereof having about 1 or 2 nucleoside substitutions, additions, or deletions, and the antisense strand comprises SEQ ID NO: 3062, the first 19 nucleobases of SEQ ID NO: 3062, or a nucleic acid sequence thereof having about 1 or 2 nucleoside substitutions, additions, or deletions; or the sense strand comprises SEQ ID NO: 5546 or a nucleic acid sequence thereof having about 1 or 2 nucleoside substitutions, additions, or deletions, and the antisense strand comprises SEQ ID NO: 5547 or a nucleic acid sequence thereof having about 1 or 2 nucleoside substitutions, additions, or deletions. 603. A pharmaceutical composition comprising a sense strand and an antisense strand, wherein the sense strand comprises SEQ ID NO: 3067, the first 19 nucleobases of SEQ ID NO: 3067, or a nucleic acid sequence thereof having about 1 or 2 nucleoside substitutions, additions, or deletions, and the antisense strand comprises SEQ ID NO: 3068, the first 19 nucleobases of SEQ ID NO: 3068, or a nucleic acid sequence thereof having about 1 or 2 nucleoside substitutions, additions, or deletions; or the sense strand comprises SEQ ID NO: 5548 or a nucleic acid sequence thereof having about 1 or 2 nucleoside substitutions, additions, or deletions, and the antisense strand comprises SEQ ID NO: 5549 or a nucleic acid sequence thereof having about 1 or 2 nucleoside substitutions, additions, or deletions. 604. A pharmaceutical composition comprising a sense strand and an antisense strand, wherein the sense strand comprises SEQ ID NO: 3501, the first 19 nucleobases of SEQ ID NO: 3501, or a nucleic acid sequence thereof having about 1 or 2 nucleoside substitutions, additions, or deletions, and the antisense strand comprises SEQ ID NO: 3502, the first 19 nucleobases of SEQ ID NO: 3502, or a nucleic acid sequence thereof having about 1 or 2 nucleoside substitutions, additions, or deletions; or the sense strand comprises SEQ ID NO: 5550 or a nucleic acid sequence thereof having about 1 or 2 nucleoside substitutions, additions, or deletions, and the antisense strand comprises SEQ ID NO: 5551 or a nucleic acid sequence thereof having about 1 or 2 nucleoside substitutions, additions, or deletions. 605. A pharmaceutical composition comprising a sense strand and an antisense strand, wherein the sense strand comprises SEQ ID NO: 3503, the first 19 nucleobases of SEQ ID NO: 3503, or a nucleic acid sequence thereof having about 1 or 2 nucleoside substitutions, additions, or deletions, and the antisense strand comprises SEQ ID NO: 3504, the first 19 nucleobases of SEQ ID NO: 3504, or a nucleic acid sequence thereof having about 1 or 2 nucleoside substitutions, additions, or deletions; or the sense strand comprises SEQ ID NO: 5552 or a nucleic acid sequence thereof having about 1 or 2 nucleoside substitutions, additions, or deletions, and the antisense strand comprises SEQ ID NO: 5553 or a nucleic acid sequence thereof having about 1 or 2 nucleoside substitutions, additions, or deletions. 606. A pharmaceutical composition comprising a sense strand and an antisense strand, wherein the sense strand comprises SEQ ID NO: 3873, the first 19 nucleobases of SEQ ID NO: 3873, or a nucleic acid sequence thereof having about 1 or 2 nucleoside substitutions, additions, or deletions, and the antisense strand comprises SEQ ID NO: 3874, the first 19 nucleobases of SEQ ID NO: 3874, or a nucleic acid sequence thereof having about 1 or 2 nucleoside substitutions, additions, or deletions; or the sense strand comprises SEQ ID NO: 5554 or a nucleic acid sequence thereof having about 1 or 2 nucleoside substitutions, additions, or deletions, and the antisense strand comprises SEQ ID NO: 5555 or a nucleic acid sequence thereof having about 1 or 2 nucleoside substitutions, additions, or deletions. 607. A pharmaceutical composition comprising a sense strand and an antisense strand, wherein the sense strand comprises SEQ ID NO: 4179, the first 19 nucleobases of SEQ ID NO: 4179, or a nucleic acid sequence thereof having about 1 or 2 nucleoside substitutions, additions, or deletions, and the antisense strand comprises SEQ ID NO: 4180, the first 19 nucleobases of SEQ ID NO: 4180, or a nucleic acid sequence thereof having about 1 or 2 nucleoside substitutions, additions, or deletions; or the sense strand comprises SEQ ID NO: 5556 or a nucleic acid sequence thereof having about 1 or 2 nucleoside substitutions, additions, or deletions, and the antisense strand comprises SEQ ID NO: 5557 or a nucleic acid sequence thereof having about 1 or 2 nucleoside substitutions, additions, or deletions. 608. A pharmaceutical composition comprising a sense strand and an antisense strand, wherein the sense strand comprises SEQ ID NO: 3027, the first 19 nucleobases of SEQ ID NO: 3027, or a nucleic acid sequence thereof having about 1 or 2 nucleoside substitutions, additions, or deletions, and the antisense strand comprises SEQ ID NO: 3028, the first 19 nucleobases of SEQ ID NO: 3028, or a nucleic acid sequence thereof having about 1 or 2 nucleoside substitutions, additions, or deletions; or the sense strand comprises SEQ ID NO: 5558 or a nucleic acid sequence thereof having about 1 or 2 nucleoside substitutions, additions, or deletions, and the antisense strand comprises SEQ ID NO: 5559 or a nucleic acid sequence thereof having about 1 or 2 nucleoside substitutions, additions, or deletions. 609. A pharmaceutical composition comprising a sense strand and an antisense strand, wherein the sense strand comprises SEQ ID NO: 3037, the first 19 nucleobases of SEQ ID NO: 3037, or a nucleic acid sequence thereof having about 1 or 2 nucleoside substitutions, additions, or deletions, and the antisense strand comprises SEQ ID NO: 3038, the first 19 nucleobases of SEQ ID NO: 3038, or a nucleic acid sequence thereof having about 1 or 2 nucleoside substitutions, additions, or deletions; or the sense strand comprises SEQ ID NO: 5560 or a nucleic acid sequence thereof having about 1 or 2 nucleoside substitutions, additions, or deletions, and the antisense strand comprises SEQ ID NO: 5561 or a nucleic acid sequence thereof having about 1 or 2 nucleoside substitutions, additions, or deletions. 610. A pharmaceutical composition comprising a sense strand and an antisense strand, wherein the sense strand comprises SEQ ID NO: 3183, the first 19 nucleobases of SEQ ID NO: 3183, or a nucleic acid sequence thereof having about 1 or 2 nucleoside substitutions, additions, or deletions, and the antisense strand comprises SEQ ID NO: 3184, the first 19 nucleobases of SEQ ID NO: 3184, or a nucleic acid sequence thereof having about 1 or 2 nucleoside substitutions, additions, or deletions; or the sense strand comprises SEQ ID NO: 5562 or a nucleic acid sequence thereof having about 1 or 2 nucleoside substitutions, additions, or deletions, and the antisense strand comprises SEQ ID NO: 5563 or a nucleic acid sequence thereof having about 1 or 2 nucleoside substitutions, additions, or deletions. 611. A pharmaceutical composition comprising a sense strand and an antisense strand, wherein the sense strand comprises SEQ ID NO: 4265, the first 19 nucleobases of SEQ ID NO: 4265, or a nucleic acid sequence thereof having about 1 or 2 nucleoside substitutions, additions, or deletions, and the antisense strand comprises SEQ ID NO: 4266, the first 19 nucleobases of SEQ ID NO: 4266, or a nucleic acid sequence thereof having about 1 or 2 nucleoside substitutions, additions, or deletions; or the sense strand comprises SEQ ID NO: 5564 or a nucleic acid sequence thereof having about 1 or 2 nucleoside substitutions, additions, or deletions, and the antisense strand comprises SEQ ID NO: 5565 or a nucleic acid sequence thereof having about 1 or 2 nucleoside substitutions, additions, or deletions. 612. A pharmaceutical composition comprising a sense strand and an antisense strand, wherein the sense strand comprises SEQ ID NO: 2629, the first 19 nucleobases of SEQ ID NO: 2629, or a nucleic acid sequence thereof having about 1 or 2 nucleoside substitutions, additions, or deletions, and the antisense strand comprises SEQ ID NO: 2630, the first 19 nucleobases of SEQ ID NO: 2630, or a nucleic acid sequence thereof having about 1 or 2 nucleoside substitutions, additions, or deletions; or the sense strand comprises SEQ ID NO: 5566 or a nucleic acid sequence thereof having about 1 or 2 nucleoside substitutions, additions, or deletions, and the antisense strand comprises SEQ ID NO: 5567 or a nucleic acid sequence thereof having about 1 or 2 nucleoside substitutions, additions, or deletions.

[0318] 613. A pharmaceutical composition comprising a sense strand and an antisense strand, wherein the sense strand comprises one or more sequences selected from SEQ ID NOS: 1-5349, 5366-5971, 6000-6038, 6050-6074, or a nucleic acid sequence thereof having about 1 or 2 nucleoside substitutions, additions, or deletions. 614. The pharmaceutical composition comprising a sense strand and an antisense strand, wherein the antisense strand comprises one or more sequences selected from SEQ ID NOS: 1-5349, 5366-5971, 6000-6038, 6050-6074, or a nucleic acid sequence thereof having about 1 or 2 nucleoside substitutions, additions, or deletions.

[0319] 615. The pharmaceutical composition of any one of embodiments 442-614, comprising the modified internucleoside linkage. 616. The pharmaceutical composition of embodiment 615, wherein the modified internucleoside linkage comprises alkylphosphonate, phosphorothioate, methylphosphonate, phosphorodithioate, alkylphosphonothioate, phosphoramidate, carbamate, carbonate, phosphate triester, acetamidate, or carboxymethyl ester, or a combination thereof. 617. The pharmaceutical composition of embodiment 616, wherein the modified internucleoside linkage comprises one or more phosphorothioate linkages. 618. The pharmaceutical composition of embodiment 617, wherein the one or more phosphorothioate linkages is about 1, 2, 3, 4, 5, 6, 7, 8, 9, 10, 11, 12, 13, 14, 15, 16, 17, 18, 19, 20, 21, 22, 23, 24, 25, 26, 27, 28, 29, 30, 31, 32, 33, 34, 35, 36, 37, 38, 39, 40, 41, or 42 phosphorothioate linkages. 619. The pharmaceutical composition of embodiment 617 or embodiment 618, wherein the sense strand of the siRNA comprises one or more phosphorothioate linkages. 620. The pharmaceutical composition of embodiment 619, wherein the one or more phosphorothioate linkages of the sense strand is about 1, 2, 3, 4, 5, 6, 7, 8, 9, 10, 11, 12, 13, 14, 15, 16, 17, 18, 19, 20, or 21 phosphorothioate linkages. 621. The pharmaceutical composition of embodiment 620, wherein the one or more phosphorothioate linkages of the sense strand is about 1, 2, 3, 4, or 5 phosphorothioate linkages. 622. The pharmaceutical composition of embodiment 621, wherein the one or more phosphorothioate linkages of the sense strand is about 4 phosphorothioate linkages. 623. The pharmaceutical composition of any one of embodiments 619-622, wherein the sense strand comprises a phosphorothioate linkage between the first nucleoside and the second nucleoside of the sense strand, in a 5′ to 3′ direction. 624. The pharmaceutical composition of any one of embodiments 619-623, wherein the sense strand comprises a phosphorothioate linkage between the second nucleoside and the third nucleoside of the sense strand, in a 5′ to 3′ direction. 625. The pharmaceutical composition of any one of embodiments 619-624, wherein the sense strand comprises a phosphorothioate linkage between the nineteenth nucleoside and the twentieth nucleoside of the sense strand, in a 5′ to 3′ direction. 626. The pharmaceutical composition of any one of embodiments 619-624, wherein the sense strand comprises a phosphorothioate linkage between the twentieth nucleoside and the twenty-first nucleoside of the sense strand, in a 5′ to 3′ direction. 627. The pharmaceutical composition of any one of embodiments 617-626, wherein the antisense strand of the siRNA comprises one or more phosphorothioate linkages. 628. The pharmaceutical composition of embodiment 627, wherein the one or more phosphorothioate linkages of the antisense strand is about 1, 2, 3, 4, 5, 6, 7, 8, 9, 10, 11, 12, 13, 14, 15, 16, 17, 18, 19, 20, or 21 phosphorothioate linkages. 629. The pharmaceutical composition of embodiment 628, wherein the one or more phosphorothioate linkages of the antisense strand is about 1, 2, 3, 4, or 5 phosphorothioate linkages. 630. The pharmaceutical composition of 629, wherein the one or more phosphorothioate linkages of the antisense strand is about 4 phosphorothioate linkages. 631. The pharmaceutical composition of any one of embodiments 627-630, wherein the antisense strand comprises a phosphorothioate linkage between the first nucleoside and the second nucleoside of the antisense strand, in a 5′ to 3′ direction. 632. The pharmaceutical composition of any one of embodiments 627-631, wherein the antisense strand comprises a phosphorothioate linkage between the second nucleoside and the third nucleoside of the antisense strand, in a 5′ to 3′ direction. 633. The pharmaceutical composition of any one of embodiments 627-632, wherein the antisense strand comprises a phosphorothioate linkage between the nineteenth nucleoside and the twentieth nucleoside of the sense strand, in a 5′ to 3′ direction. 634. The pharmaceutical composition of any one of embodiments 627-633, wherein the antisense strand comprises a phosphorothioate linkage between the twentieth nucleoside and the twenty-first nucleoside of the sense strand, in a 5′ to 3′ direction.

[0320] 635. The pharmaceutical composition of any one of embodiments 442-634, comprising the modified nucleoside. 636. The pharmaceutical composition of embodiment 635, wherein the modified nucleoside comprises a locked nucleic acid (LNA), hexitol nucleic acid (HLA), cyclohexene nucleic acid (CeNA), 2′-methoxyethyl, 2′-O-alkyl, 2′-O-allyl, 2′-O-allyl, 2′-fluoro, or 2′-deoxy, or a combination thereof. 637. The pharmaceutical composition of embodiment 635 or embodiment 636, wherein the modified nucleoside comprises a 2′-O-methyl nucleoside, 2′-deoxyfluoro nucleoside, 2′-O—N-methylacetamido (2′-O-NMA) nucleoside, a 2′-O-dimethylaminoethoxyethyl (2′-O-DMAEOE) nucleoside, 2′-O-aminopropyl (2′-O-AP) nucleoside, or 2′-ara-F, or a combination thereof. 638. The pharmaceutical composition of any one of embodiments 635-637, wherein the modified nucleoside comprises one or more 2′fluoro modified nucleosides. 639. The pharmaceutical composition of embodiment 638, wherein the one or more 2′ fluoro modified nucleosides is about 1, 2, 3, 4, 5, 6, 7, 8, 9, 10, 11, 12, 13, 14, 15, 16, 17, 18, 19, 20, 21, 22, 23, 24, 25, 26, 27, 28, 29, 30, 31, 32, 33, 34, 35, 36, 37, 38, 39, 40, 41, or 42 2′ fluoro modified nucleosides. 640. The pharmaceutical composition of embodiment 638 or embodiment 639, wherein the sense strand of the siRNA comprises one or more 2′ fluoro modified nucleosides. 641. The pharmaceutical composition of embodiment 640, wherein the one or more 2′ fluoro modified nucleosides of the sense strand is about 1, 2, 3, 4, 5, 6, 7, 8, 9, 10, 11, 12, 13, 14, 15, 16, 17, 18, 19, 20, or 21 2′ fluoro modified nucleosides. 642. The pharmaceutical composition of embodiment 641, wherein the one or more 2′ fluoro modified nucleosides of the sense strand is about eleven 2′ fluoro modified nucleosides. 643. The pharmaceutical composition of embodiment 641, wherein the one or more 2′ fluoro modified nucleosides of the sense strand is about four 2′ fluoro modified nucleosides. 644. The pharmaceutical composition of embodiment 641, wherein the one or more 2′ fluoro modified nucleosides of the sense strand is about three 2′ fluoro modified nucleosides. 645. The pharmaceutical composition of any one of embodiments 640-644, wherein the first nucleoside of the sense strand comprises the 2′ fluoro modified nucleoside, in a 5′ to 3′ direction. 646. The pharmaceutical composition of any one of embodiments 640-645, wherein the third nucleoside of the sense strand comprises the 2′ fluoro modified nucleoside, in a 5′ to 3′ direction. 647. The pharmaceutical composition of any one of embodiments 640-646, wherein the fifth nucleoside of the sense strand comprises the 2′ fluoro modified nucleoside, in a 5′ to 3′ direction. 648. The pharmaceutical composition of any one of embodiments 640-647, wherein the seventh nucleoside of the sense strand comprises the 2′ fluoro modified nucleoside, in a 5′ to 3′ direction. 649. The pharmaceutical composition of any one of embodiments 640-648, wherein the eighth nucleoside of the sense strand comprises the 2′ fluoro modified nucleoside, in a 5′ to 3′ direction. 650. The pharmaceutical composition of any one of embodiments 640-649, wherein the ninth nucleoside of the sense strand comprises the 2′ fluoro modified nucleoside, in a 5′ to 3′ direction. 651. The pharmaceutical composition of any one of embodiments 640-650, wherein the eleventh nucleoside of the sense strand comprises the 2′ fluoro modified nucleoside, in a 5′ to 3′ direction. 652. The pharmaceutical composition of any one of embodiments 640-651, wherein the thirteenth nucleoside of the sense strand comprises the 2′ fluoro modified nucleoside, in a 5′ to 3′ direction. 653. The pharmaceutical composition of any one of embodiments 640-652, wherein the fifteenth nucleoside of the sense strand comprises the 2′ fluoro modified nucleoside, in a 5′ to 3′ direction. 654. The pharmaceutical composition of any one of embodiments 640-653, wherein the seventeenth nucleoside of the sense strand comprises the 2′ fluoro modified nucleoside, in a 5′ to 3′ direction. 655. The pharmaceutical composition of any one of embodiments 640-654, wherein the nineteenth nucleoside of the sense strand comprises the 2′ fluoro modified nucleoside, in a 5′ to 3′ direction. 656. The pharmaceutical composition of any one of embodiments 640-655, wherein the fifth, seventh, and ninth nucleosides of the sense strand comprises the 2′ fluoro modified nucleoside, in a 5′ to 3′ direction. 657. The pharmaceutical composition of any one of embodiments 640-656, wherein the sense strand comprises the pattern fN-Z1-fN-Z2-fN, wherein fN comprises the 2′ fluoro modified nucleoside and Z1 and Z2 are independently a 2′ O-methyl modified nucleoside or a 2′ fluoro modified nucleoside. 658. The pharmaceutical composition of embodiment 657, wherein the fN-Z1-fN-Z2-fN corresponds to nucleosides five to nine of the sense strand, in a 5′ to 3′ direction. 659. The pharmaceutical composition of any one of embodiments 640-658, wherein the sense strand comprises at least two contiguous 2′ fluoro modified nucleosides. 660. The pharmaceutical composition of embodiment 659, wherein the at least two contiguous 2′ fluoro modified nucleosides is two contiguous 2′ fluoro modified nucleosides. 661. The pharmaceutical composition of embodiment 659, wherein the at least two contiguous 2′ fluoro modified nucleosides is three contiguous 2′ fluoro modified nucleosides. 662. The pharmaceutical composition of any one of embodiments 638-661, wherein the antisense strand of the siRNA comprises one or more 2′ fluoro modified nucleosides. 663. The pharmaceutical composition of embodiment 662, wherein the one or more 2′ fluoro modified nucleosides of the antisense strand is about 1, 2, 3, 4, 5, 6, 7, 8, 9, 10, 11, 12, 13, 14, 15, 16, 17, 18, 19, 20, or 21 2′ fluoro modified nucleosides. 664. The pharmaceutical composition of embodiment 663, wherein the one or more 2′ fluoro modified nucleosides of the antisense strand is about eight 2′ fluoro modified nucleosides. 665. The pharmaceutical composition of embodiment 663, wherein the one or more 2′ fluoro modified nucleosides of the antisense strand is about six 2′ fluoro modified nucleosides. 666. The pharmaceutical composition of embodiment 663, wherein the one or more 2′ fluoro modified nucleosides of the antisense strand is about five 2′ fluoro modified nucleosides. 667. The pharmaceutical composition of embodiment 663, wherein the one or more 2′ fluoro modified nucleosides of the antisense strand is about four 2′ fluoro modified nucleosides. 668. The pharmaceutical composition of any one of embodiments 662-667, wherein the second nucleoside of the antisense strand comprises the 2′ fluoro modified nucleoside, in a 5′ to 3′ direction. 669. The pharmaceutical composition of any one of embodiments 662-668, wherein the fourth nucleoside of the antisense strand comprises the 2′ fluoro modified nucleoside, in a 5′ to 3′ direction. 670. The pharmaceutical composition of any one of embodiments 662-669, wherein the sixth nucleoside of the antisense strand comprises the 2′ fluoro modified nucleoside, in a 5′ to 3′ direction. 671. The pharmaceutical composition of any one of embodiments 662-670, wherein the eighth nucleoside of the antisense strand comprises the 2′ fluoro modified nucleoside, in a 5′ to 3′ direction. 672. The pharmaceutical composition of any one of embodiments 662-671, wherein the ninth nucleoside of the antisense strand comprises the 2′ fluoro modified nucleoside, in a 5′ to 3′ direction. 673. The pharmaceutical composition of any one of embodiments 662-672, wherein the tenth nucleoside of the antisense strand comprises the 2′ fluoro modified nucleoside, in a 5′ to 3′ direction. 674. The pharmaceutical composition of any one of embodiments 662-673, wherein the fourteenth nucleoside of the antisense strand comprises the 2′ fluoro modified nucleoside, in a 5′ to 3′ direction. 675. The pharmaceutical composition of any one of embodiments 662-674, wherein the sixteenth nucleoside of the antisense strand comprises the 2′ fluoro modified nucleoside, in a 5′ to 3′ direction. 676. The pharmaceutical composition of any one of embodiments 662-675, wherein the eighteenth nucleoside of the antisense strand comprises the 2′ fluoro modified nucleoside, in a 5′ to 3′ direction. 677. The pharmaceutical composition of any one of embodiments 662-676, wherein the second and fourteenth nucleosides of the antisense strand comprises the 2′ fluoro modified nucleoside, in a 5′ to 3′ direction. 678. The pharmaceutical composition of any one of embodiments 662-677, wherein the second, sixth, fourteenth, and sixteenth nucleosides of the antisense strand comprises the 2′ fluoro modified nucleoside, in a 5′ to 3′ direction. 679. The pharmaceutical composition of any one of embodiments 662-678, wherein the antisense strand comprises the pattern Z3-fN-Z4-fN, wherein fN comprises the 2′ fluoro modified nucleoside and Z3 and Z4 are independently a 2′ O-methyl modified nucleoside or a 2′ fluoro modified nucleoside. 680. The pharmaceutical composition of embodiment 679, wherein the Z3-fN-Z4-fN corresponds to nucleosides thirteen to sixteen of the antisense strand, in a 5′ to 3′ direction.

[0321] 681. The pharmaceutical composition of any one of embodiments 635-680, wherein the modified nucleoside comprises a 2′ O-alkyl modified nucleoside. 682. The pharmaceutical composition of embodiment 681, wherein the 2′-O-alkyl modified nucleoside comprises one or more 2′ O-methyl modified nucleosides. 683. The pharmaceutical composition of embodiment 682, wherein the one or more 2′ O-methyl modified nucleosides is about 1, 2, 3, 4, 5, 6, 7, 8, 9, 10, 11, 12, 13, 14, 15, 16, 17, 18, 19, 20, 21, 22, 23, 24, 25, 26, 27, 28, 29, 30, 31, 32, 33, 34, 35, 36, 37, 38, 39, 40, 41, or 42 2′ O-methyl modified nucleosides. 684. The pharmaceutical composition of any one of embodiments 681-683, wherein the sense strand of the siRNA comprises one or more 2′ O-methyl modified nucleosides. 685. The pharmaceutical composition of embodiment 684, wherein the one or more 2′ O-methyl modified nucleosides of the sense strand is about 1, 2, 3, 4, 5, 6, 7, 8, 9, 10, 11, 12, 13, 14, 15, 16, 17, 18, 19, 20, or 21 2′ O-methyl modified nucleosides. 686. The pharmaceutical composition of embodiment 685, wherein the one or more 2′ O-methyl modified nucleosides of the sense strand is about ten 2′ O-methyl modified nucleosides. 687. The pharmaceutical composition of embodiment 685, wherein the one or more 2′ O-methyl modified nucleosides of the sense strand is about seventeen 2′ O-methyl modified nucleosides. 688. The pharmaceutical composition of embodiment 685, wherein the one or more 2′ O-methyl modified nucleosides of the sense strand is about eighteen 2′ O-methyl modified nucleosides. 689. The pharmaceutical composition of any one of embodiments 684-688, wherein the first nucleoside of the sense strand comprises the 2′ O-methyl modified nucleoside, in a 5′ to 3′ direction. 690. The pharmaceutical composition of any one of embodiments 684-689, wherein the second nucleoside of the sense strand comprises the 2′ O-methyl modified nucleoside, in a 5′ to 3′ direction. 691. The pharmaceutical composition of any one of embodiments 684-690, wherein the third nucleoside of the sense strand comprises the 2′ O-methyl modified nucleoside, in a 5′ to 3′ direction. 692. The pharmaceutical composition of any one of embodiments 684-691, wherein the fourth nucleoside of the sense strand comprises the 2′ O-methyl modified nucleoside, in a 5′ to 3′ direction. 693. The pharmaceutical composition of any one of embodiments 684-692, wherein the sixth nucleoside of the sense strand comprises the 2′ O-methyl modified nucleoside, in a 5′ to 3′ direction. 694. The pharmaceutical composition of any one of embodiments 684-693, wherein the eighth nucleoside of the sense strand comprises the 2′ O-methyl modified nucleoside, in a 5′ to 3′ direction. 695. The pharmaceutical composition of any one of embodiments 684-694, wherein the tenth nucleoside of the sense strand comprises the 2′ O-methyl modified nucleoside, in a 5′ to 3′ direction. 696. The pharmaceutical composition of any one of embodiments 684-695, wherein the eleventh nucleoside of the sense strand comprises the 2′ O-methyl modified nucleoside, in a 5′ to 3′ direction. 697. The pharmaceutical composition of any one of embodiments 684-696, wherein the twelfth nucleoside of the sense strand comprises the 2′ O-methyl modified nucleoside, in a 5′ to 3′ direction. 698. The pharmaceutical composition of any one of embodiments 684-697, wherein the thirteenth nucleoside of the sense strand comprises the 2′ O-methyl modified nucleoside, in a 5′ to 3′ direction. 699. The pharmaceutical composition of any one of embodiments 684-698, wherein the fourteenth nucleoside of the sense strand comprises the 2′ O-methyl modified nucleoside, in a 5′ to 3′ direction. 700. The pharmaceutical composition of any one of embodiments 684-699, wherein the fifteenth nucleoside of the sense strand comprises the 2′ O-methyl modified nucleoside, in a 5′ to 3′ direction. 701. The pharmaceutical composition of any one of embodiments 684-700, wherein the sixteenth nucleoside of the sense strand comprises the 2′ O-methyl modified nucleoside, in a 5′ to 3′ direction. 702. The pharmaceutical composition of any one of embodiments 684-701, wherein the seventeenth nucleoside of the sense strand comprises the 2′ O-methyl modified nucleoside, in a 5′ to 3′ direction. 703. The pharmaceutical composition of any one of embodiments 684-702, wherein the eighteenth nucleoside of the sense strand comprises the 2′ O-methyl modified nucleoside, in a 5′ to 3′ direction. 704. The pharmaceutical composition of any one of embodiments 684-703, wherein the nineteenth nucleoside of the sense strand comprises the 2′ O-methyl modified nucleoside, in a 5′ to 3′ direction. 705. The pharmaceutical composition of any one of embodiments 684-704, wherein the twentieth nucleoside of the sense strand comprises the 2′ O-methyl modified nucleoside, in a 5′ to 3′ direction. 706. The pharmaceutical composition of any one of embodiments 684-705, wherein the twenty-first nucleoside of the sense strand comprises the 2′ O-methyl modified nucleoside, in a 5′ to 3′ direction. 707. The pharmaceutical composition of any one of embodiments 684-706, wherein the second, fourth, sixth, tenth, twelfth, fourteenth, and sixteenth, eighteenth, twentieth, and twenty-first nucleosides of the sense strand comprises the 2′ O-methyl modified nucleoside, in a 5′ to 3′ direction. 708. The pharmaceutical composition of any one of embodiments 684-707, wherein the sense strand comprises the pattern mN-Z5-mN-Z6, wherein mN comprises the 2′ O-methyl modified nucleoside and Z5 and Z6 are independently a 2′ O-methyl modified nucleoside or a 2′ fluoro modified nucleoside. 709. The pharmaceutical composition of embodiment 708, wherein the mN-Z5-mN-Z6-mN corresponds to nucleosides four to seven of the sense strand, in a 5′ to 3′ direction. 710. The pharmaceutical composition of embodiment 708 or embodiment 709, wherein Z5 is the 2′ fluoro modified nucleoside. 711. The pharmaceutical composition of embodiment 708 or embodiment 709, wherein Z5 is the 2′ O-methyl modified nucleoside. 712. The pharmaceutical composition of any one of embodiments 708-711, wherein Z6 is the 2′ fluoro modified nucleoside. 713. The pharmaceutical composition of any one of embodiments 708-711, wherein Z6 is the 2′ O-methyl modified nucleoside. 714. The pharmaceutical composition of any one of embodiments 684-713, wherein the sense strand comprises the pattern mN-Z5-mN-Z6-mN, wherein mN comprises the 2′ O-methyl modified nucleoside and Z5 and Z6 are independently a 2′ O-methyl modified nucleoside or a 2′ fluoro modified nucleoside. 715. The pharmaceutical composition of embodiment 715, wherein the mN-Z5-mN-Z6-mN corresponds to nucleosides two to six of the sense strand, in a 5′ to 3′ direction. 716. The pharmaceutical composition of embodiment 715, wherein the mN-Z5-mN-Z6-mN corresponds to nucleosides ten to fourteen of the sense strand, in a 5′ to 3′ direction. 717. The pharmaceutical composition of embodiment 715, wherein the mN-Z5-mN-Z6-mN corresponds to nucleosides twelve to sixteen of the sense strand, in a 5′ to 3′ direction. 718. The pharmaceutical composition of embodiment 715, wherein the mN-Z5-mN-Z6-mN corresponds to nucleosides fourteen to eighteen of the sense strand, in a 5′ to 3′ direction. 719. The pharmaceutical composition of embodiment 715, wherein the mN-Z5-mN-Z6-mN corresponds to nucleosides sixteen to twenty of the sense strand, in a 5′ to 3′ direction. 720. The pharmaceutical composition of any one of embodiments 684-719, wherein the sense strand comprises the pattern mN-Z5-mN-Z6-mN-Z7-mN, wherein Z7 is a 2′ O-methyl modified nucleoside or a 2′ fluoro modified nucleoside. 721. The pharmaceutical composition of embodiment 720, wherein the mN-Z5-mN-Z6-mN-Z7-mN corresponds to nucleosides ten to sixteen of the sense strand, in a 5′ to 3′ direction. 722. The pharmaceutical composition of embodiment 720, wherein the mN-Z5-mN-Z6-mN-Z7-mN corresponds to nucleosides twelve to eighteen of the sense strand, in a 5′ to 3′ direction. 723. The pharmaceutical composition of embodiment 720, wherein the mN-Z5-mN-Z6-mN-Z7-mN corresponds to nucleosides fourteen to twenty of the sense strand, in a 5′ to 3′ direction. 724. The pharmaceutical composition of any one of embodiments 684-723, wherein the sense strand comprises the pattern mN-Z5-mN-Z6-mN-Z7-mN-Z8-mN, wherein Z8 is a 2′ O-methyl modified nucleoside or a 2′ fluoro modified nucleoside. 725. The pharmaceutical composition of embodiment 724, wherein the mN-Z5-mN-Z6-mN-Z7-mN-Z8-mN corresponds to nucleosides ten to eighteen of the sense strand, in a 5′ to 3′ direction. 726. The pharmaceutical composition of embodiment 724, wherein the mN-Z5-mN-Z6-mN-Z7-mN-Z8-mN corresponds to nucleosides twelve to twenty of the sense strand, in a 5′ to 3′ direction. 727. The pharmaceutical composition of any one of embodiments 684-726, wherein the sense strand comprises the pattern mN-Z5-mN-Z6-mN-Z7-mN-Z8-mN-Z9-mN, wherein Z9 is a 2′ O-methyl modified nucleoside or a 2′ fluoro modified nucleoside. 728. The pharmaceutical composition of embodiment 727, wherein the mN-Z5-mN-Z6-mN-Z7-mN-Z8-mN-Z9-mN corresponds to nucleosides ten to twenty of the sense strand, in a 5′ to 3′ direction. 729. The pharmaceutical composition of any one of embodiments 684-728, wherein the sense strand comprises at least two contiguous 2′ O-methyl modified nucleosides. 730. The pharmaceutical composition of embodiment 729, wherein the at least two contiguous 2′ O-methyl modified nucleosides is three contiguous 2′ O-methyl modified nucleosides. 731. The pharmaceutical composition of embodiment 729, wherein the at least two contiguous 2′ O-methyl modified nucleosides is four contiguous 2′ O-methyl modified nucleosides. 732. The pharmaceutical composition of embodiment 729, wherein the at least two contiguous 2′ O-methyl modified nucleosides is five contiguous 2′ O-methyl modified nucleosides. 733. The pharmaceutical composition of embodiment 729, wherein the at least two contiguous 2′ O-methyl modified nucleosides is six contiguous 2′ O-methyl modified nucleosides. 734. The pharmaceutical composition of embodiment 729, wherein the at least two contiguous 2′ O-methyl modified nucleosides is seven contiguous 2′ O-methyl modified nucleosides. 735. The pharmaceutical composition of embodiment 729, wherein the at least two contiguous 2′ O-methyl modified nucleosides is eight contiguous 2′ O-methyl modified nucleosides. 736. The pharmaceutical composition of embodiment 729, wherein the at least two contiguous 2′ O-methyl modified nucleosides is nine contiguous 2′ O-methyl modified nucleosides. 737. The pharmaceutical composition of embodiment 729, wherein the at least two contiguous 2′ O-methyl modified nucleosides is ten contiguous 2′ O-methyl modified nucleosides. 738. The pharmaceutical composition of embodiment 729, wherein the at least two contiguous 2′ O-methyl modified nucleosides is eleven contiguous 2′ O-methyl modified nucleosides. 739. The pharmaceutical composition of embodiment 729, wherein the at least two contiguous 2′ O-methyl modified nucleosides is twelve contiguous 2′ O-methyl modified nucleosides. 740. The pharmaceutical composition of any one of embodiments 681-739, wherein the antisense strand of the siRNA comprises one or more 2′ O-methyl modified nucleosides. 741. The pharmaceutical composition of embodiment 740, wherein the one or more 2′ O-methyl modified nucleosides of the antisense strand is about 1, 2, 3, 4, 5, 6, 7, 8, 9, 10, 11, 12, 13, 14, 15, 16, 17, 18, 19, 20, or 21 2′ O-methyl modified nucleosides. 742. The pharmaceutical composition of embodiment 741, wherein the one or more 2′ O-methyl modified nucleosides of the antisense strand is about thirteen 2′ O-methyl modified nucleosides. 743. The pharmaceutical composition of embodiment 741, wherein the one or more 2′ O-methyl modified nucleosides of the antisense strand is about fifteen 2′ O-methyl modified nucleosides. 744. The pharmaceutical composition of embodiment 741, wherein the one or more 2′ O-methyl modified nucleosides of the antisense strand is about seventeen 2′ O-methyl modified nucleosides. 745. The pharmaceutical composition of any one of embodiments 740-744, wherein the first nucleoside of the antisense strand comprises the 2′ O-methyl modified nucleoside, in a 5′ to 3′ direction. 746. The pharmaceutical composition of any one of embodiments 740-745, wherein the third nucleoside of the antisense strand comprises the 2′ O-methyl modified nucleoside, in a 5′ to 3′ direction. 747. The pharmaceutical composition of any one of embodiments 740-746, wherein the fourth nucleoside of the antisense strand comprises the 2′ O-methyl modified nucleoside, in a 5′ to 3′ direction. 748. The pharmaceutical composition of any one of embodiments 740-747, wherein the fifth nucleoside of the antisense strand comprises the 2′ O-methyl modified nucleoside, in a 5′ to 3′ direction. 749. The pharmaceutical composition of any one of embodiments 740-748, wherein the seventh nucleoside of the antisense strand comprises the 2′ O-methyl modified nucleoside, in a 5′ to 3′ direction. 750. The pharmaceutical composition of any one of embodiments 740-749, wherein the eighth nucleoside of the antisense strand comprises the 2′ O-methyl modified nucleoside, in a 5′ to 3′ direction. 751. The pharmaceutical composition of any one of embodiments 740-750, wherein the ninth nucleoside of the antisense strand comprises the 2′ O-methyl modified nucleoside, in a 5′ to 3′ direction. 752. The pharmaceutical composition of any one of embodiments 740-751, wherein the tenth nucleoside of the antisense strand comprises the 2′ O-methyl modified nucleoside, in a 5′ to 3′ direction. 753. The pharmaceutical composition of any one of embodiments 740-752, wherein the eleventh nucleoside of the antisense strand comprises the 2′ O-methyl modified nucleoside, in a 5′ to 3′ direction. 754. The pharmaceutical composition of any one of embodiments 740-753, wherein the twelfth nucleoside of the antisense strand comprises the 2′ O-methyl modified nucleoside, in a 5′ to 3′ direction. 755. The pharmaceutical composition of any one of embodiments 740-754, wherein the thirteenth nucleoside of the antisense strand comprises the 2′ O-methyl modified nucleoside, in a 5′ to 3′ direction. 756. The pharmaceutical composition of any one of embodiments 740-755, wherein the fifteenth nucleoside of the antisense strand comprises the 2′ O-methyl modified nucleoside, in a 5′ to 3′ direction. 757. The pharmaceutical composition of any one of embodiments 740-756, wherein the seventeenth nucleoside of the antisense strand comprises the 2′ O-methyl modified nucleoside, in a 5′ to 3′ direction. 758. The pharmaceutical composition of any one of embodiments 740-757, wherein the eighteenth nucleoside of the antisense strand comprises the 2′ O-methyl modified nucleoside, in a 5′ to 3′ direction. 759. The pharmaceutical composition of any one of embodiments 740-758, wherein the nineteenth nucleoside of the antisense strand comprises the 2′ O-methyl modified nucleoside, in a 5′ to 3′ direction. 760. The pharmaceutical composition of any one of embodiments 740-759, wherein the twentieth nucleoside of the antisense strand comprises the 2′ O-methyl modified nucleoside, in a 5′ to 3′ direction. 761. The pharmaceutical composition of any one of embodiments 740-760, wherein the twenty-first nucleoside of the antisense strand comprises the 2′ O-methyl modified nucleoside, in a 5′ to 3′ direction. 762. The pharmaceutical composition of any one of embodiments 740-761, wherein the first, third, fifth, seventh, eleventh, twelfth, thirteenth, fifteenth, seventeenth, nineteenth, twentieth, and twenty-first nucleosides of the antisense strand comprises the 2′ O-methyl modified nucleoside, in a 5′ to 3′ direction. 763. The pharmaceutical composition of any one of embodiments 740-762, wherein the antisense strand comprises at least two contiguous 2′ O-methyl modified nucleosides. 764. The pharmaceutical composition of embodiment 763, wherein the at least two contiguous 2′ O-methyl modified nucleosides is three contiguous 2′ O-methyl modified nucleosides. 765. The pharmaceutical composition of embodiment 763, wherein the at least two contiguous 2′ O-methyl modified nucleosides is four contiguous 2′ O-methyl modified nucleosides. 766. The pharmaceutical composition of embodiment 763, wherein the at least two contiguous 2′ O-methyl modified nucleosides is five contiguous 2′ O-methyl modified nucleosides. 767. The pharmaceutical composition of embodiment 763, wherein the at least two contiguous 2′ O-methyl modified nucleosides is six contiguous 2′ O-methyl modified nucleosides. 768. The pharmaceutical composition of embodiment 763, wherein the at least two contiguous 2′ O-methyl modified nucleosides is seven contiguous 2′ O-methyl modified nucleosides. 769. The pharmaceutical composition of any one of embodiments 740-768, wherein the antisense strand comprises a first sequence comprising at least two contiguous 2′ O-methyl modified nucleosides and a second sequence comprising at least two contiguous 2′ O-methyl modified nucleosides. 770. The pharmaceutical composition of embodiment 769, wherein the first sequence comprises at least three contiguous 2′ O-methyl modified nucleosides, and the second sequence comprises at least three contiguous 2′ O-methyl modified nucleosides. 771. The pharmaceutical composition of embodiment 770, wherein the first sequence comprises three contiguous 2′ O-methyl modified nucleosides, and the second sequence comprises three contiguous 2′ O-methyl modified nucleosides. 772. The pharmaceutical composition of embodiment 770, wherein the first sequence comprises four contiguous 2′ O-methyl modified nucleosides, and the second sequence comprises five contiguous 2′ O-methyl modified nucleosides. 773. The pharmaceutical composition of embodiment 770, wherein the first sequence comprises seven contiguous 2′ O-methyl modified nucleosides, and the second sequence comprises five contiguous 2′ O-methyl modified nucleosides. 774. The pharmaceutical composition of embodiment 770, wherein the first sequence comprises at least four contiguous 2′ O-methyl modified nucleosides. 775. The pharmaceutical composition of embodiment 770, wherein the first sequence comprises at least five contiguous 2′ O-methyl modified nucleosides. 776. The pharmaceutical composition of embodiment 770, wherein the first sequence comprises at least six contiguous 2′ O-methyl modified nucleosides. 777. The pharmaceutical composition of embodiment 770, wherein the first sequence comprises at least seven contiguous 2′ O-methyl modified nucleosides. 778. The pharmaceutical composition of any one of embodiments 769-777, wherein the second sequence comprises at least four contiguous 2′ O-methyl modified nucleosides. 779. The pharmaceutical composition of any one of embodiments 769-777, wherein the second sequence comprises at least five contiguous 2′ O-methyl modified nucleosides. 780. The pharmaceutical composition of any one of embodiments 769-777, wherein the second sequence comprises at least six contiguous 2′ O-methyl modified nucleosides. 781. The pharmaceutical composition of any one of embodiments 769-777, wherein the second sequence comprises at least seven contiguous 2′ O-methyl modified nucleosides.

[0322] 782. The pharmaceutical composition of any one of embodiments 442-781, wherein the sense strand comprises a ribose. 783. The pharmaceutical composition of embodiment 782, wherein the sense strand comprises about 1, 2, 3, 4, 5, 6, 7, 8, 9, 10, 11, 12, 13, 14, 15, 16, 17, 18, 19, 20, or 21 ribose. 784. The pharmaceutical composition of embodiment 782 or embodiment 783, wherein the nucleoside at position 1, 2, 3, 4, 5, 6, 7, 8, 9, 10, 11, 12, 13, 14, 15, 16, 17, 18, 19, 20, or 21, or any combination thereof, comprises the ribose, in a 5′ to 3′ direction. 785. The pharmaceutical composition of any one of embodiments 442-784, wherein the antisense strand comprises a ribose. 786. The pharmaceutical composition of embodiment 785, wherein the antisense strand comprises about 1, 2, 3, 4, 5, 6, 7, 8, 9, 10, 11, 12, 13, 14, 15, 16, 17, 18, 19, 20, or 21 ribose. 787. The pharmaceutical composition of embodiment 785 or embodiment 786, wherein the nucleoside at position 1, 2, 3, 4, 5, 6, 7, 8, 9, 10, 11, 12, 13, 14, 15, 16, 17, 18, 19, 20, or 21, or any combination thereof, comprises the ribose, in a 5′ to 3′ direction. 788. The pharmaceutical composition of any one of embodiments 442-787, further comprising a lipid attached at either 3′ or 5′ terminus of the sense strand and/or antisense strand. 789. The pharmaceutical composition of embodiment 788, wherein the lipid comprises cholesterol, myristoyl, palmitoyl, stearoyl, lithocholoyl, docosanoyl, docosahexaenoyl, myristyl, palmityl stearyl, or α-tocopherol, or a combination thereof. 790. The pharmaceutical composition of embodiment 788 or embodiment 789, wherein the lipid comprises a first lipid on the sense strand and a second lipid on the antisense strand. 791. The pharmaceutical composition of any one of embodiments 788-790, wherein the lipid is positioned on the sense strand. 792. The pharmaceutical composition of embodiment 791, wherein the lipid is positioned at the 5′ end of the sense strand. 793. The pharmaceutical composition of embodiment 791, wherein the lipid is positioned at the 3′ end of the sense strand. 794. The pharmaceutical composition of any one of embodiments 788-793, wherein the lipid is positioned on the antisense strand. 795. The pharmaceutical composition of embodiment 794, wherein the lipid is positioned at the 5′ end of the antisense strand. 796. The pharmaceutical composition of embodiment 794, wherein the lipid is positioned at the 3′ end of the antisense strand. 797. The pharmaceutical composition of any one of embodiments 442-796, wherein the sense strand and the antisense strand form a double-stranded RNA duplex. 798. The pharmaceutical composition of embodiment 797, wherein the double-stranded RNA duplex comprises from about 14 to about 30 nucleosides. 799. The pharmaceutical composition of embodiment 798, wherein the double-stranded RNA duplex comprises from about 17 to about 30 nucleosides. 800. The pharmaceutical composition of embodiment 799, wherein the double-stranded RNA duplex comprises about 21 nucleosides. 801. The pharmaceutical composition of any one of embodiments 797-800, wherein the double-stranded RNA duplex comprises at least one base pair. 802. The pharmaceutical composition of embodiment 801, wherein the first base pair of the double-stranded RNA duplex is an AU base pair. 803. The pharmaceutical composition of any one of embodiments 442-802, wherein the sense strand comprises pattern 1S: 5′ fN s mN s fN-mN-fN-mN-fN-fN-fN-mN-fN-mN-fN-mN-fN-mN-fN-mN-fN s mN s mN 3′, wherein “fN” is a 2′ fluoro-modified nucleoside, “mN” is a 2′ O-methyl modified nucleoside, “-” is a phosphodiester, and “s” is a phosphorothioate.

[0323] 804. The pharmaceutical composition of any one of embodiments 442-802, wherein the sense strand comprises pattern 2S: 5′ mN s mN s mN-mN-fN-mN-fN-fN-fN-mN-mN-mN-mN-mN-mN-mN-mN-mN-mN s mN s mN 3′, wherein “fN” is a 2′ fluoro-modified nucleoside, “mN” is a 2′ O-methyl modified nucleoside, “-” is a phosphodiester, and “s” is a phosphorothioate. 805. The pharmaceutical composition of any one of embodiments 442-802, wherein the sense strand comprises pattern 3S: 5′ mN s mN s mN-mN-fN-mN-fN-mN-fN-mN-mN-mN-mN-mN-mN-mN-mN-mN-mN s mN s mN 3′, wherein “fN” is a 2′ fluoro-modified nucleoside, “mN” is a 2′ O-methyl modified nucleoside, “-” is a phosphodiester, and “s” is a phosphorothioate. 806. The pharmaceutical composition of any one of embodiments 442-802, wherein the sense strand comprises pattern 4S: 5′ fN s mN s fN-mN-fN-mN-fN-fN-fN-mN-fN-mN-fN-mN-fN-mN-fN-mN-fN s mN s mN-N-Lipid 3′, wherein “fN” is a 2′ fluoro-modified nucleoside, “mN” is a 2′ O-methyl modified nucleoside, “-” is a phosphodiester, “s” is a phosphorothioate, and N comprises one or more nucleosides. 807. The pharmaceutical composition of embodiment 806, wherein the one or more nucleosides is three nucleosides. 808. The pharmaceutical composition of embodiment 806 of embodiment 807, wherein each of the one or more nucleosides independently comprise a ribose or deoxyribose. 809. The pharmaceutical composition of any one of embodiments 442-802, wherein the sense strand comprises pattern 5S: 5′ mN s mN s mN-mN-fN-mN-fN-fN-fN-mN-mN-mN-mN-mN-mN-mN-mN-mN-mN s mN s mN-N-Lipid 3′, wherein “fN” is a 2′ fluoro-modified nucleoside, “mN” is a 2′ O-methyl modified nucleoside, “-” is a phosphodiester, “s” is a phosphorothioate, and N comprises one or more nucleosides. 810. The pharmaceutical composition of embodiment 809, wherein the one or more nucleosides is three nucleosides. 811. The pharmaceutical composition of embodiment 809 of embodiment 810, wherein each of the one or more nucleosides independently comprise a ribose or deoxyribose. 812. The pharmaceutical composition of any one of embodiments 442-811, wherein the antisense strand comprises pattern 1AS: 5′ mN s fN s mN-fN-mN-fN-mN-fN-mN-fN-mN-mN-mN-fN-mN-fN-mN-fN-mN s mN s mN 3′, wherein “fN” is a 2′ fluoro-modified nucleoside, “mN” is a 2′ O-methyl modified nucleoside, “-” is a phosphodiester, and “s” is a phosphorothioate. 813. The pharmaceutical composition of any one of embodiments 442-811, wherein the antisense strand comprises pattern 2AS: 5′ mN s fN s mN-mN-mN-fN-mN-fN-fN-mN-mN-mN-mN-fN-mN-fN-mN-mN-mN s mN s mN 3′, wherein “fN” is a 2′ fluoro-modified nucleoside, “mN” is a 2′ O-methyl modified nucleoside, “-” is a phosphodiester, and “s” is a phosphorothioate. 814. The pharmaceutical composition of any one of embodiments 442-811, wherein the antisense strand comprises pattern 3AS: 5′ mN s fN s mN-mN-mN-fN-mN-mN-mN-mN-mN-mN-mN-fN-mN-fN-mN-mN-mN s mN s mN 3′, wherein “fN” is a 2′ fluoro-modified nucleoside, “mN” is a 2′ O-methyl modified nucleoside, “-” is a phosphodiester, and “s” is a phosphorothioate. 815. The pharmaceutical composition of any one of embodiments 442-811, wherein the antisense strand comprises pattern 4AS: 5′ mN s fN s mN-fN-mN-fN-mN-mN-mN-mN-mN-mN-mN-fN-mN-fN-mN-mN-mN s mN s mN 3′, wherein “fN” is a 2′ fluoro-modified nucleoside, “mN” is a 2′ O-methyl modified nucleoside, “-” is a phosphodiester, and “s” is a phosphorothioate.

[0324] 816. The pharmaceutical composition of any one of embodiments 442-802, wherein the sense strand comprises mUsmGsmGmUfGmUfCfGfAmGmAmGmAmUmCmAmCmUmAsmUsmU (SEQ ID NO: 5558), or a nucleic acid sequence thereof having about 1 or 2 nucleoside substitutions, additions, or deletions. 817. The pharmaceutical composition of any one of embodiments 442-802, wherein the sense strand comprises mUsmCsmGmAfGmAfGfAfUmCmAmCmUmGmAmAmAmUmAsmUsmU (SEQ ID NO: 5560), or a nucleic acid sequence thereof having about 1 or 2 nucleoside substitutions, additions, or deletions. 818. The pharmaceutical composition of any one of embodiments 442-802, wherein the sense strand comprises mCsmAsmGmGfUmUfUfGfCmCmAmCmUmUmUmGmUmCmAsmUsmU (SEQ ID NO: 5562), or a nucleic acid sequence thereof having about 1 or 2 nucleoside substitutions, additions, or deletions. 819. The pharmaceutical composition of any one of embodiments 442-802, wherein the sense strand comprises mGsmCsmAmCfCmUfUfUfUmCmAmUmGmGmUmCmUmCmAsmUsmU (SEQ ID NO: 5564), or a nucleic acid sequence thereof having about 1 or 2 nucleoside substitutions, additions, or deletions. 820. The pharmaceutical composition of any one of embodiments 442-802, wherein the sense strand comprises mAsmGsmCmUfGmGfAfGfCmCmUmUmCmCmUmAmAmCmAsmUsmU (SEQ ID NO: 5566), or a nucleic acid sequence thereof having about 1 or 2 nucleoside substitutions, additions, or deletions. 821. The pharmaceutical composition of any one of embodiments 442-802, wherein the sense strand comprises fUsmGsfGmUfGmUfCfGfAmGfAmGfAmUfCmAfCmUfAsmUsmU (SEQ ID NO: 5456), or a nucleic acid sequence thereof having about 1 or 2 nucleoside substitutions, additions, or deletions. 822. The pharmaceutical composition of any one of embodiments 442-802, wherein the sense strand comprises fUsmCsfGmAfGmAfGfAfUmCfAmCfUmGfAmAfAmUfAsmUsmU (SEQ ID NO: 5460), or a nucleic acid sequence thereof having about 1 or 2 nucleoside substitutions, additions, or deletions. 823. The pharmaceutical composition of any one of embodiments 442-802, wherein the sense strand comprises fCsmAsfGmGfUmUfUfGfCmCfAmCfUmUfUmGfUmCfAsmUsmU (SEQ ID NO: 5476), or a nucleic acid sequence thereof having about 1 or 2 nucleoside substitutions, additions, or deletions. 824. The pharmaceutical composition of any one of embodiments 442-802, wherein the sense strand comprises fGsmCsfAmCfCmUfUfUfUmCfAmUfGmGfUmCfUmCfAsmUsmU (SEQ ID NO: 5510), or a nucleic acid sequence thereof having about 1 or 2 nucleoside substitutions, additions, or deletions. 825. The pharmaceutical composition of any one of embodiments 442-802, wherein the sense strand comprises fAsmGsfCmUfGmGfAfGfCmCfUmUfCmCfUmAfAmCfAsmUsmU (SEQ ID NO: 5524), or a nucleic acid sequence thereof having about 1 or 2 nucleoside substitutions, additions, or deletions. 826. The pharmaceutical composition of any one of embodiments 442-802, wherein the sense strand comprises mUsmGsmGmUfGmUfCmGfAmGmAmGmAmUmCmAmCmUmAsmUsmU (SEQ ID NO: 6050). 827. The pharmaceutical composition of any one of embodiments 442-802, wherein the sense strand comprises mUsmCsmGmAfGmAfGmAfUmCmAmCmUmGmAmAmAmUmAsmUsmU (SEQ ID NO: 6051), or a nucleic acid sequence thereof having about 1 or 2 nucleoside substitutions, additions, or deletions. 828. The pharmaceutical composition of any one of embodiments 442-802, wherein the sense strand comprises mCsmAsmGmGfUmUfUmGfCmCmAmCmUmUmUmGmUmCmAsmUsmU (SEQ ID NO: 6052), or a nucleic acid sequence thereof having about 1 or 2 nucleoside substitutions, additions, or deletions. 829. The pharmaceutical composition of any one of embodiments 442-802, wherein the sense strand comprises mGsmCsmAmCfCmUfUmUfUmCmAmUmGmGmUmCmUmCmAsmUsmU (SEQ ID NO: 6053), or a nucleic acid sequence thereof having about 1 or 2 nucleoside substitutions, additions, or deletions. 830. The pharmaceutical composition of any one of embodiments 442-802, wherein the sense strand comprises mAsmGsmCmUfGmGfAmGfCmCmUmUmCmCmUmAmAmCmAsmUsmU (SEQ ID NO: 6054), or a nucleic acid sequence thereof having about 1 or 2 nucleoside substitutions, additions, or deletions. 831. The pharmaceutical composition of any one of embodiments 442-802, wherein the sense strand comprises fUsmGsfGmUfGmUfCfGfAmGfAmGfAmUfCmAfCmUfAsmUsmUNNN-lipid (wherein each N is independently a nucleobase such as A, U, C, or G) (SEQ ID NO: 6055), or a nucleic acid sequence thereof having about 1 or 2 nucleoside substitutions, additions, or deletions. 832. The pharmaceutical composition of any one of embodiments 442-802, wherein the sense strand comprises fUsmCsfGmAfGmAfGfAfUmCfAmCfUmGfAmAfAmUfAsmUsmUNNN-lipid (wherein each N is independently a nucleobase such as A, U, C, or G) (SEQ ID NO: 6056), or a nucleic acid sequence thereof having about 1 or 2 nucleoside substitutions, additions, or deletions. 833. The pharmaceutical composition of any one of embodiments 442-802, wherein the sense strand comprises fCsmAsfGmGfUmUfUfGfCmCfAmCfUmUfUmGfUmCfAsmUsmUNNN-lipid (wherein each N is independently a nucleobase such as A, U, C, or G) (SEQ ID NO: 6057), or a nucleic acid sequence thereof having about 1 or 2 nucleoside substitutions, additions, or deletions. 834. The pharmaceutical composition of any one of embodiments 442-802, wherein the sense strand comprises fGsmCsfAmCfCmUfUfUfUmCfAmUfGmGfUmCfUmCfAsmUsmUNNN-lipid (wherein each N is independently a nucleobase such as A, U, C, or G) (SEQ ID NO: 6058), or a nucleic acid sequence thereof having about 1 or 2 nucleoside substitutions, additions, or deletions. 835. The pharmaceutical composition of any one of embodiments 442-802, wherein the sense strand comprises fAsmGsfCmUfGmGfAfGfCmCfUmUfCmCfUmAfAmCfAsmUsmUNNN-lipid (wherein each N is independently a nucleobase such as A, U, C, or G) (SEQ ID NO: 6059), or a nucleic acid sequence thereof having about 1 or 2 nucleoside substitutions, additions, or deletions. 836. The pharmaceutical composition of any one of embodiments 442-802, wherein the sense strand comprises mUsmGsmGmUfGmUfCfGfAmGmAmGmAmUmCmAmCmUmAsmUsmUNNN-lipid (wherein each N is independently a nucleobase such as A, U, C, or G) (SEQ ID NO: 6060), or a nucleic acid sequence thereof having about 1 or 2 nucleoside substitutions, additions, or deletions. 837. The pharmaceutical composition of any one of embodiments 442-802, wherein the sense strand comprises mUsmCsmGmAfGmAfGfAfUmCmAmCmUmGmAmAmAmUmAsmUsmUNNN-lipid (wherein each N is independently a nucleobase such as A, U, C, or G) (SEQ ID NO: 6061), or a nucleic acid sequence thereof having about 1 or 2 nucleoside substitutions, additions, or deletions. 838. The pharmaceutical composition of any one of embodiments 442-802, wherein the sense strand comprises mCsmAsmGmGfUmUfUfGfCmCmAmCmUmUmUmGmUmCmAsmUsmUNNN-lipid (wherein each N is independently a nucleobase such as A, U, C, or G) (SEQ ID NO: 6062), or a nucleic acid sequence thereof having about 1 or 2 nucleoside substitutions, additions, or deletions. 839. The pharmaceutical composition of any one of embodiments 442-802, wherein the sense strand comprises mGsmCsmAmCfCmUfUfUfUmCmAmUmGmGmUmCmUmCmAsmUsmUNNN-lipid (wherein each N is independently a nucleobase such as A, U, C, or G) (SEQ ID NO: 6063), or a nucleic acid sequence thereof having about 1 or 2 nucleoside substitutions, additions, or deletions. 840. The pharmaceutical composition of any one of embodiments 442-802, wherein the sense strand comprises mAsmGsmCmUfGmGfAfGfCmCmUmUmCmCmUmAmAmCmAsmUsmUNNN-lipid (wherein each N is independently a nucleobase such as A, U, C, or G) (SEQ ID NO: 6064), or a nucleic acid sequence thereof having about 1 or 2 nucleoside substitutions, additions, or deletions. 841. The pharmaceutical composition of any one of embodiments 816-840, wherein the antisense strand comprises mUsfAsmGmUmGfAmUmCmUmCmUmCmGfAmCfAmCmCmAsmUsmU (SEQ ID NO: 5559), or a nucleic acid sequence thereof having about 1 or 2 nucleoside substitutions, additions, or deletions. 842. The pharmaceutical composition of any one of embodiments 816-840, wherein the antisense strand comprises mUsfAsmUmUmUfCmAmGmUmGmAmUmCfUmCfUmCmGmAsmUsmU (SEQ ID NO: 5561), or a nucleic acid sequence thereof having about 1 or 2 nucleoside substitutions, additions, or deletions. 843. The pharmaceutical composition of any one of embodiments 816-840, wherein the antisense strand comprises mUsfGsmAmCmAfAmAmGmUmGmGmCmAfAmAfCmCmUmGsmUsmU (SEQ ID NO: 5563), or a nucleic acid sequence thereof having about 1 or 2 nucleoside substitutions, additions, or deletions. 844. The pharmaceutical composition of any one of embodiments 816-840, wherein the antisense strand comprises mUsfGsmAmGmAfCmCmAmUmGmAmAmAfAmGfGmUmGmCsmUsmU (SEQ ID NO: 5565), or a nucleic acid sequence thereof having about 1 or 2 nucleoside substitutions, additions, or deletions. 845. The pharmaceutical composition of any one of embodiments 816-840, wherein the antisense strand comprises mUsfGsmUmUmAfGmGmAmAmGmGmCmUfCmCfAmGmCmUsmUsmU (SEQ ID NO: 5567), or a nucleic acid sequence thereof having about 1 or 2 nucleoside substitutions, additions, or deletions. 846. The pharmaceutical composition of any one of embodiments 816-840, wherein the antisense strand comprises mUsfAsmGfUmGfAmUfCmUfCmUmCmGfAmCfAmCfCmAsmUsmU (SEQ ID NO: 5457), or a nucleic acid sequence thereof having about 1 or 2 nucleoside substitutions, additions, or deletions. 847. The pharmaceutical composition of any one of embodiments 816-840, wherein the antisense strand comprises mUsfAsmUfUmUfCmAfGmUfGmAmUmCfUmCfUmCfGmAsmUsmU (SEQ ID NO: 5461), or a nucleic acid sequence thereof having about 1 or 2 nucleoside substitutions, additions, or deletions. 848. The pharmaceutical composition of any one of embodiments 816-840, wherein the antisense strand comprises mUsfGsmAfCmAfAmAfGmUfGmGmCmAfAmAfCmCfUmGsmUsmU (SEQ ID NO: 5477), or a nucleic acid sequence thereof having about 1 or 2 nucleoside substitutions, additions, or deletions. 849. The pharmaceutical composition of any one of embodiments 816-840, wherein the antisense strand comprises mUsfGsmAfGmAfCmCfAmUfGmAmAmAfAmGfGmUfGmCsmUsmU (SEQ ID NO: 5511), or a nucleic acid sequence thereof having about 1 or 2 nucleoside substitutions, additions, or deletions. 850. The pharmaceutical composition of any one of embodiments 816-840, wherein the antisense strand comprises mUsfGsmUfUmAfGmGfAmAfGmGmCmUfCmCfAmGfCmUsmUsmU (SEQ ID NO: 5525), or a nucleic acid sequence thereof having about 1 or 2 nucleoside substitutions, additions, or deletions. 851. The pharmaceutical composition of any one of embodiments 816-840, wherein the antisense strand comprises mUsfAsmGmUmGfAmUfCfUmCmUmCmGfAmCfAmCmCmAsmUsmU (SEQ ID NO: 6065), or a nucleic acid sequence thereof having about 1 or 2 nucleoside substitutions, additions, or deletions. 852. The pharmaceutical composition of any one of embodiments 816-840, wherein the antisense strand comprises mUsfAsmUmUmUfCmAfGfUmGmAmUmCfUmCfUmCmGmAsmUsmU (SEQ ID NO: 6066), or a nucleic acid sequence thereof having about 1 or 2 nucleoside substitutions, additions, or deletions. 853. The pharmaceutical composition of any one of embodiments 816-840, wherein the antisense strand comprises mUsfGsmAmCmAfAmAfGfUmGmGmCmAfAmAfCmCmUmGsmUsmU (SEQ ID NO: 6067), or a nucleic acid sequence thereof having about 1 or 2 nucleoside substitutions, additions, or deletions. 854. The pharmaceutical composition of any one of embodiments 816-840, wherein the antisense strand comprises mUsfGsmAmGmAfCmCfAfUmGmAmAmAfAmGfGmUmGmCsmUsmU (SEQ ID NO: 6068), or a nucleic acid sequence thereof having about 1 or 2 nucleoside substitutions, additions, or deletions. 855. The pharmaceutical composition of any one of embodiments 816-840, wherein the antisense strand comprises mUsfGsmUmUmAfGmGfAfAmGmGmCmUfCmCfAmGmCmUsmUsmU (SEQ ID NO: 6069), or a nucleic acid sequence thereof having about 1 or 2 nucleoside substitutions, additions, or deletions 856. The pharmaceutical composition of any one of embodiments 816-840, wherein the antisense strand comprises mUsfAsmGfUmGfAmUmCmUmCmUmCmGfAmCfAmCmCmAsmUsmU (SEQ ID NO: 6070), or a nucleic acid sequence thereof having about 1 or 2 nucleoside substitutions, additions, or deletions. 857. The pharmaceutical composition of any one of embodiments 816-840, wherein the antisense strand comprises mUsfAsmUfUmUfCmAmGmUmGmAmUmCfUmCfUmCmGmAsmUsmU (SEQ ID NO: 6071), or a nucleic acid sequence thereof having about 1 or 2 nucleoside substitutions, additions, or deletions. 858. The pharmaceutical composition of any one of embodiments 816-840, wherein the antisense strand comprises mUsfGsmAfCmAfAmAmGmUmGmGmCmAfAmAfCmCmUmGsmUsmU (SEQ ID NO: 6072), or a nucleic acid sequence thereof having about 1 or 2 nucleoside substitutions, additions, or deletions. 859. The pharmaceutical composition of any one of embodiments 816-840, wherein the antisense strand comprises mUsfGsmAfGmAfCmCmAmUmGmAmAmAfAmGfGmUmGmCsmUsmU (SEQ ID NO: 6073), or a nucleic acid sequence thereof having about 1 or 2 nucleoside substitutions, additions, or deletions. 860. The pharmaceutical composition of any one of embodiments 816-840, wherein the antisense strand comprises mUsfGsmUfUmAfGmGmAmAmGmGmCmUfCmCfAmGmCmUsmUsmU (SEQ ID NO: 6074), or a nucleic acid sequence thereof having about 1 or 2 nucleoside substitutions, additions, or deletions.

[0325] 861. The pharmaceutical composition of any one of embodiments 442-802, wherein the sense strand comprises pattern 1S and the antisense strand comprises pattern 1AS. 862. The pharmaceutical composition of any one of embodiments 442-802, wherein the sense strand comprises pattern 2S and the antisense strand comprises pattern 2AS. 863. The pharmaceutical composition of any one of embodiments 442-802, wherein the sense strand comprises pattern 3S and the antisense strand comprises pattern 3AS. 864. The pharmaceutical composition of any one of embodiments 442-802, wherein the sense strand comprises pattern 4S and the antisense strand comprises pattern 4AS. 865. A method of treating one or more disorders of the upper and lower airway in a patient in need thereof, the method comprising administering to the patient an siRNA that targets a portion of mRNA encoding ALOX15, wherein the siRNA comprises a sense strand and an antisense strand, and a double-stranded nucleic acid region, and wherein there is greater than 90% sequence identity or greater than 90% sequence complementarity between the double-stranded nucleic acid region of the siRNA and the portion of mRNA encoding ALOX15 that is targeted by the siRNA; wherein the one or more disorders of the upper and lower airways comprises nasal polyposis, chronic sinusitis, allergic rhinitis, or NSAID-exacerbated respiratory disease, or a combination thereof. 866. The method of embodiment 865, wherein the portion comprises from about 14 to about 30 contiguous nucleosides of the mRNA encoding ALOX15.

[0326] 867. A method of treating one or more disorders of the upper and lower airway in a patient in need thereof, the method comprising administering to the patient an agent comprising a siRNA directed towards a ALOX15 target sequence, the siRNA comprising: a) a sense sequence comprising a nucleic acid sequence identical to or substantially identical to the ALOX15 target sequence, wherein the sense strand that is substantially identical to the ALOX15 target sequence differs in identity from the ALOX15 target sequence by no more than five nucleosides; and b) an anti-sense sequence comprising a nucleic acid sequence complementary to or substantially complementary to the ALOX15 target sequence, wherein the antisense strand that is substantially complementary to the ALOX15 target sequence differs in complementarity from the ALOX15 target sequence by no more than five nucleosides; wherein the method is effective in treating the one or more disorders, and the one or more disorders comprises nasal polyposis, chronic sinusitis, allergic rhinitis, or NSAID-exacerbated respiratory disease, or a combination thereof. 868. The method of embodiment 867, wherein the ALOX15 target sequence comprises from about 14 to about 30 contiguous nucleosides of SEQ ID NO: 5357. 869. The method of any one of embodiments 865-868, wherein the siRNA is administered in an effective amount to reduce eosinophil count in the patient. 870. The method of any one of embodiments 865-869, wherein the siRNA is administered in an effective amount to reduce number and/or size of nasal polyps in the patient. 871. The method of any one of embodiments 865-870, wherein the siRNA is administered in an effective amount to increase nasal inspiratory peak in the patient. 872. The method of any one of embodiments 865-871, wherein the siRNA is administered in an effective amount to reduce airway symptoms in the patient. 873. The method of any one of embodiments 865-872, wherein the siRNA comprises any pharmaceutical composition of embodiments 1-864.

### Pharmaceutical Compositions and Formulations

[0327] In some embodiments, the pharmaceutical formulations described herein are administered to a subject by multiple administration routes, including but not limited to, parenteral (e.g., intravenous, subcutaneous, intramuscular), oral, intranasal, buccal, rectal, or transdermal administration routes. In some instances, the pharmaceutical composition describe herein is formulated for parenteral (e.g., intravenous, subcutaneous, intramuscular, intra-arterial, intraperitoneal, intrathecal, intracerebral, intracerebroventricular, or intracranial) administration. In other instances, the pharmaceutical composition describe herein is formulated for oral administration. In still other instances, the pharmaceutical composition describe herein is formulated for intranasal administration.

[0328] In some embodiments, the pharmaceutical formulations include, but are not limited to, aqueous liquid dispersions, self-emulsifying dispersions, solid solutions, liposomal dispersions, aerosols, solid dosage forms, powders, immediate release formulations, controlled release formulations, fast melt formulations, tablets, capsules, pills, delayed release formulations, extended release formulations, pulsatile release formulations, multiparticulate formulations (e.g., nanoparticle formulations), and mixed immediate and controlled release formulations.

[0329] In some instances, the pharmaceutical formulation includes multiparticulate formulations. In some instances, the pharmaceutical formulation includes nanoparticle formulations. In some instances, nanoparticles comprise cMAP, cyclodextrin, or lipids. In some cases, nanoparticles comprise solid lipid nanoparticles, polymeric nanoparticles, self-emulsifying nanoparticles, liposomes, microemulsions, or micellar solutions. Additional exemplary nanoparticles include, but are not limited to, paramagnetic nanoparticles, superparamagnetic nanoparticles, metal nanoparticles, fullerene-like materials, inorganic nanotubes, dendrimers (such as with covalently attached metal chelates), nanofibers, nanohorns, nano-onions, nanorods, nanoropes and quantum dots. In some instances, a nanoparticle is a metal nanoparticle, e.g., a nanoparticle of scandium, titanium, vanadium, chromium, manganese, iron, cobalt, nickel, copper, zinc, yttrium, zirconium, niobium, molybdenum, ruthenium, rhodium, palladium, silver, cadmium, hafnium, tantalum, tungsten, rhenium, osmium, iridium, platinum, gold, gadolinium, aluminum, gallium, indium, tin, thallium, lead, bismuth, magnesium, calcium, strontium, barium, lithium, sodium, potassium, boron, silicon, phosphorus, germanium, arsenic, antimony, and combinations, alloys or oxides thereof. In some instances, a nanoparticle includes a core or a core and a shell, as in a core-shell nanoparticle. In some instances, a nanoparticle is further coated with molecules for attachment of functional elements (e.g., with one or more of a polynucleic acid molecule or binding moiety described herein). In some instances, a coating comprises chondroitin sulfate, dextran sulfate, carboxymethyl dextran, alginic acid, pectin, carragheenan, fucoidan, agaropectin, porphyran, karaya gum, gellan gum, xanthan gum, hyaluronic acids, glucosamine, galactosamine, chitin (or chitosan), polyglutamic acid, polyaspartic acid, lysozyme, cytochrome C, ribonuclease, trypsinogen, chymotrypsinogen, α-chymotrypsin, polylysine, polyarginine, histone, protamine, ovalbumin or dextrin or cyclodextrin. In some instances, a nanoparticle comprises a graphene-coated nanoparticle. In some cases, a nanoparticle has at least one dimension of less than about 500 nm, 400 nm, 300 nm, 200 nm, or 100 nm. In some instances, the nanoparticle formulation comprises paramagnetic nanoparticles, superparamagnetic nanoparticles, metal nanoparticles, fullerene-like materials, inorganic nanotubes, dendrimers (such as with covalently attached metal chelates), nanofibers, nanohorns, nano-onions, nanorods, nanoropes or quantum dots. In some instances, a polynucleic acid molecule or a binding moiety described herein is conjugated either directly or indirectly to the nanoparticle. In some instances, at least 1, 5, 10, 15, 20, 30, 40, 50, 60, 70, 80, 90, 100 or more polynucleic acid molecules or binding moieties described herein are conjugated either directly or indirectly to a nanoparticle.

[0330] In some embodiments, the pharmaceutical formulation comprises a delivery vector, e.g., a recombinant vector, for the delivery of the polynucleic acid molecule into cells. In some instances, the recombinant vector is DNA plasmid. In other instances, the recombinant vector is a viral vector. Exemplary viral vectors include vectors derived from adeno-associated virus, retrovirus, adenovirus, or alphavirus. In some instances, the recombinant vectors capable of expressing the polynucleic acid molecules provide stable expression in target cells. In additional instances, viral vectors are used that provide for transient expression of polynucleic acid molecules.

[0331] The pharmacokinetics and biodistribution of nanoparticles are dependent upon their size and charge. Upon iv administration, large (>200 nm) and/or highly positively charged (surface charge >20 mV) are primarily distributed among endothelial tissues and macrophages in the liver and spleen and have a half-life of circulation less than 2 hours. Reduction in size (<100 nm) and surface charge (˜0 mV) results increased circulation times. Local administration of positively charged polyplexes results in association with cells at site of application such as epithelial cells.

[0332] Strategies for cytoplasmic delivery. There are a variety of strategies to facilitate cytoplasmic delivery of oligonucleotides including endosomal buffering (i.e. proton sponge), titratable amphiphiles, cell penetrating peptides and masked membrane lytic polymers. The mechanism of endosomal buffering (i.e. proton sponge) to facilitate endosomolysis relies on the ability of agents such as polyamines to buffer endosomal/lysosomal compartments. The resistance to acidification is postulated to result in increased osmotic pressure that results in lysis of the lysosomal compartment. Titratable amphiphiles are polymers/peptides whose structure is pH-dependent in such a way that at acidic pH they are hydrophobic and membrane disruptive. Typically, titratable amphiphiles are polyanionic polymers or peptides composed of carboxylic acids that become neutral and membrane disruptive upon acidification. Cell penetrating peptides (CPPs) are cationic peptides, with a high propensity of guanidinium groups, that enter cells without any apparent membrane lysis. Masked lytic polymers are membrane disruptive polymers whose membrane interactivity is attenuated by reversible covalent modification. Like titratable amphiphiles, the mechanism of endosomolysis by masked polymers relies on the use of amphipathic polymers whose ability to lyse membranes is controlled such that the activity is only functional in the acidic environment of the endosome/lysosome. In the case of titratable amphiphiles, the mechanism of control is a reversible protonation of carboxylic acids. In the case of masked polymers, the control of membrane activity is the irreversible cleavage of a group that inhibits membrane interactivity of the polymer.

[0333] In some embodiments, the pharmaceutical formulations include a carrier or carrier materials selected on the basis of compatibility with the composition disclosed herein, and the release profile properties of the desired dosage form. Exemplary carrier materials include, e.g., binders, suspending agents, disintegration agents, filling agents, surfactants, solubilizers, stabilizers, lubricants, wetting agents, diluents, and the like. Pharmaceutically compatible carrier materials include, but are not limited to, acacia, gelatin, colloidal silicon dioxide, calcium glycerophosphate, calcium lactate, maltodextrin, glycerine, magnesium silicate, polyvinylpyrrollidone (PVP), cholesterol, cholesterol esters, sodium caseinate, soy lecithin, taurocholic acid, phosphotidylcholine, sodium chloride, tricalcium phosphate, dipotassium phosphate, cellulose and cellulose conjugates, sugars sodium stearoyl lactylate, carrageenan, monoglyceride, diglyceride, pregelatinized starch, and the like. See, e.g., Remington: The Science and Practice of Pharmacy, Nineteenth Ed (Easton, Pa.: Mack Publishing Company, 1995); Hoover, John E., Remington's Pharmaceutical Sciences, Mack Publishing Co., Easton, Pa. 1975; Liberman, H. A. and Lachman, L., Eds., Pharmaceutical Dosage Forms, Marcel Decker, New York, N.Y., 1980; and Pharmaceutical Dosage Forms and Drug Delivery Systems, Seventh Ed. (Lippincott Williams & Wilkins 1999).

[0334] In some instances, the pharmaceutical formulations further include pH adjusting agents or buffering agents which include acids such as acetic, boric, citric, lactic, phosphoric and hydrochloric acids; bases such as sodium hydroxide, sodium phosphate, sodium borate, sodium citrate, sodium acetate, sodium lactate and tris-hydroxymethylaminomethane; and buffers such as citrate/dextrose, sodium bicarbonate and ammonium chloride. Such acids, bases and buffers are included in an amount required to maintain pH of the composition in an acceptable range.

[0335] In some instances, the pharmaceutical formulation includes one or more salts in an amount required to bring osmolality of the composition into an acceptable range. Such salts include those having sodium, potassium or ammonium cations and chloride, citrate, ascorbate, borate, phosphate, bicarbonate, sulfate, thiosulfate or bisulfite anions; suitable salts also include sodium chloride, potassium chloride, sodium thiosulfate, sodium bisulfite and ammonium sulfate.

[0336] In some instances, the pharmaceutical formulations further include a diluent which used to stabilize compounds because it provides a more stable environment. Salts dissolved in buffered solutions (which also provide pH control or maintenance) are utilized as diluents in the art, including, but not limited to a phosphate buffered saline solution. In certain instances, diluents increase bulk of the composition to facilitate compression or create sufficient bulk for homogenous blend for capsule filling. Such compounds include e.g., lactose, starch, mannitol, sorbitol, dextrose, microcrystalline cellulose such as Avicel®; dibasic calcium phosphate, dicalcium phosphate dihydrate; tricalcium phosphate, calcium phosphate; anhydrous lactose, spray-dried lactose; pregelatinized starch, compressible sugar, such as Di-Pac® (Amstar); mannitol, hydroxypropylmethylcellulose, hydroxypropylmethylcellulose acetate stearate, sucrose-based diluents, confectioner's sugar; monobasic calcium sulfate monohydrate, calcium sulfate dihydrate; calcium lactate trihydrate, dextrates; hydrolyzed cereal solids, amylose; powdered cellulose, calcium carbonate; glycine, kaolin; mannitol, sodium chloride; inositol, bentonite, and the like.

[0337] In some cases, the pharmaceutical formulations include disintegration agents or disintegrants to facilitate the breakup or disintegration of a substance. The term “disintegrate” include both the dissolution and dispersion of the dosage form when contacted with gastrointestinal fluid. Examples of disintegration agents include a starch, e.g., a natural starch such as corn starch or potato starch, a pregelatinized starch such as National 1551 or Amijel®, or sodium starch glycolate such as Promogel® or Explotab®, a cellulose such as a wood product, methylcrystalline cellulose, e.g., Avicel®, Avicel® PH101, Avicel®PH102, Avicel® PH105, Elcema® P100, Emcocel®, Vivacel®, Ming Tia®, and Solka-Floc®, methylcellulose, croscarmellose, or a cross-linked cellulose, such as cross-linked sodium carboxymethylcellulose (Ac-Di-Sol®), cross-linked carboxymethylcellulose, or cross-linked croscarmellose, a cross-linked starch such as sodium starch glycolate, a cross-linked polymer such as crospovidone, a cross-linked polyvinylpyrrolidone, alginate such as alginic acid or a salt of alginic acid such as sodium alginate, a clay such as Veegum® HV (magnesium aluminum silicate), a gum such as agar, guar, locust bean, Karaya, pectin, or tragacanth, sodium starch glycolate, bentonite, a natural sponge, a surfactant, a resin such as a cation-exchange resin, citrus pulp, sodium lauryl sulfate, sodium lauryl sulfate in combination starch, and the like.

[0338] In some instances, the pharmaceutical formulations include filling agents such as lactose, calcium carbonate, calcium phosphate, dibasic calcium phosphate, calcium sulfate, microcrystalline cellulose, cellulose powder, dextrose, dextrates, dextran, starches, pregelatinized starch, sucrose, xylitol, lactitol, mannitol, sorbitol, sodium chloride, polyethylene glycol, and the like.

[0339] Lubricants and glidants are also optionally included in the pharmaceutical formulations described herein for preventing, reducing or inhibiting adhesion or friction of materials. Exemplary lubricants include, e.g., stearic acid, calcium hydroxide, talc, sodium stearyl fumerate, a hydrocarbon such as mineral oil, or hydrogenated vegetable oil such as hydrogenated soybean oil (Sterotex®), higher fatty acids and their alkali-metal and alkaline earth metal salts, such as aluminum, calcium, magnesium, zinc, stearic acid, sodium stearates, glycerol, talc, waxes, Stearowet®, boric acid, sodium benzoate, sodium acetate, sodium chloride, leucine, a polyethylene glycol (e.g., PEG-4000) or a methoxypolyethylene glycol such as Carbowax™ sodium oleate, sodium benzoate, glyceryl behenate, polyethylene glycol, magnesium or sodium lauryl sulfate, colloidal silica such as Syloid™, Cab-O-Sil®, a starch such as corn starch, silicone oil, a surfactant, and the like.

[0340] Plasticizers include compounds used to soften the microencapsulation material or film coatings to make them less brittle. Suitable plasticizers include, e.g., polyethylene glycols such as PEG 300, PEG 400, PEG 600, PEG 1450, PEG 3350, and PEG 800, stearic acid, propylene glycol, oleic acid, triethyl cellulose and triacetin. Plasticizers also function as dispersing agents or wetting agents.

[0341] Solubilizers include compounds such as triacetin, triethylcitrate, ethyl oleate, ethyl caprylate, sodium lauryl sulfate, sodium doccusate, vitamin E TPGS, dimethylacetamide, N-methylpyrrolidone, N-hydroxyethylpyrrolidone, polyvinylpyrrolidone, hydroxypropylmethyl cellulose, hydroxypropyl cyclodextrins, ethanol, n-butanol, isopropyl alcohol, cholesterol, bile salts, polyethylene glycol 200-600, glycofurol, transcutol, propylene glycol, and dimethyl isosorbide and the like.

[0342] Stabilizers include compounds such as any antioxidation agents, buffers, acids, preservatives and the like.

[0343] Suspending agents include compounds such as polyvinylpyrrolidone, e.g., polyvinylpyrrolidone K12, polyvinylpyrrolidone K17, polyvinylpyrrolidone K25, or polyvinylpyrrolidone K30, vinyl pyrrolidone/vinyl acetate copolymer (S630), polyethylene glycol, e.g., the polyethylene glycol has a molecular weight of about 300 to about 6000, or about 3350 to about 4000, or about 7000 to about 5400, sodium carboxymethylcellulose, methylcellulose, hydroxypropylmethylcellulose, hydroxymethylcellulose acetate stearate, polysorbate-80, hydroxyethylcellulose, sodium alginate, gums, such as, e.g., gum tragacanth and gum acacia, guar gum, xanthans, including xanthan gum, sugars, cellulosics, such as, e.g., sodium carboxymethylcellulose, methylcellulose, sodium carboxymethylcellulose, hydroxypropylmethylcellulose, hydroxyethylcellulose, polysorbate-80, sodium alginate, polyethoxylated sorbitan monolaurate, polyethoxylated sorbitan monolaurate, povidone and the like.

[0344] Surfactants include compounds such as sodium lauryl sulfate, sodium docusate, Tween 60 or 80, triacetin, vitamin E TPGS, sorbitan monooleate, polyoxyethylene sorbitan monooleate, polysorbates, polaxomers, bile salts, glyceryl monostearate, copolymers of ethylene oxide and propylene oxide, e.g., Pluronic® (BASF), and the like. Additional surfactants include polyoxyethylene fatty acid glycerides and vegetable oils, e.g., polyoxyethylene (60) hydrogenated castor oil; and polyoxyethylene alkylethers and alkylphenyl ethers, e.g., octoxynol 10, octoxynol 40. Sometimes, surfactants is included to enhance physical stability or for other purposes.

[0345] Viscosity enhancing agents include, e.g., methyl cellulose, xanthan gum, carboxymethyl cellulose, hydroxypropyl cellulose, hydroxypropylmethyl cellulose, hydroxypropylmethyl cellulose acetate stearate, hydroxypropylmethyl cellulose phthalate, carbomer, polyvinyl alcohol, alginates, acacia, chitosans and combinations thereof.

[0346] Wetting agents include compounds such as oleic acid, glyceryl monostearate, sorbitan monooleate, sorbitan monolaurate, triethanolamine oleate, polyoxyethylene sorbitan monooleate, polyoxyethylene sorbitan monolaurate, sodium docusate, sodium oleate, sodium lauryl sulfate, sodium doccusate, triacetin, Tween 80, vitamin E TPGS, ammonium salts and the like.

[0347] Conjugated oligonucleotides: oligonucleotides may have groups conjugated—via covalent bonds—that prolong circulation, provide targeting to tissues and facilitate intracellular delivery. In some embodiments, circulation is prolonged by the conjugation of polyethylene glycol (PEG). Conjugation of PEG can prevent clearance by two mechanisms: the increase in molecular weight above threshold for renal clearance and the prevention of non-specific interactions with extracellular surfaces and serum components. PEG can be incorporated into nucleic acid delivery vehicles by attachment to components that non-covalently associate with the nucleic acids, e.g. PEGylated lipids and polymers. In some embodiments, conjugation comprises direct PEG conjugation to increase nucleic acid circulation times, decrease nonspecific interactions and alter biodistribution; however, the targeting is passive and the potency of the nucleic may be compromised as PEG MW increases.

[0348] A commonly invoked tumor targeting mechanism is the Enhanced Permeability and Retention (EPR) effect, which is when nanoparticles accumulate in tumor tissue much more than they do in normal tissues due to the leaky disorganized vasculature associated with tumor tissues and their lack of lymphatic drainage. EPR-based targeting requires long circulating particles.

[0349] Polymer based delivery vehicles: Like lipoplexes, polymer-based transfection vehicles (polyplexes) provide nuclease protection and condensation of larger nucleic acids. Polyplexes are based upon cationic polymers that form electrostatic complexes with anionic nucleic acids. Polycations may be purely synthetic (such as polyethyleneimine), naturally occurring (such as histones, protamine, spermine and spermidine) or synthetic polymers based upon cationic amino acids such as ornithine, lysine and arginine.

[0350] Polycations form electrostatic complexes with polyanionic nucleic acids. The strength of the association is dependent upon the size of the nucleic acid and the size and charge density of the polycation.

[0351] There are three common strategies to improve the stability and surface charge of polyplexes to improve the circulation and targeting of ability of polyplexes: crosslinking of polycation, addition of a synthetic polyanion and conjugation of PEG.

[0352] Crosslinking, also called lateral stabilization and caging, is the formation of covalent polyamine-polyamine bonds after complexation/condensation of the nucleic acid. The crosslinking is accomplished by the addition of bifunctional, amine-reactive reagents that form a 3-D network of bonds around the nucleic acid, thereby making the polyplex resistant to displacement by salts and polyelectrolytes. The stability of the polyplexes is such that the nucleic acid is no longer active unless a mechanism of reversibility is introduced to allow for release of the nucleic acid. A common way to introduce reversibility is the use of disulfide-containing crosslinking reagent that can be reduced in the cytoplasm allowing release of nucleic acid therapeutic.

[0353] An exemplary method to reduce the surface charge of a polyplex is the conjugation of PEG, a method commonly known as steric stabilization. The resulting PEG modified polyplexes have prolonged circulation in vivo. PEG modifications can be added to the size chains of polyamines-either before or after polyplex formation- or at the end of the polymer as a block copolymer of PEG and polycation.

[0354] Crosslinking and PEGylation are often combined to make stabilized polyplexes of reduced surface charge for systemic administration that can either be passively or actively targeted. As observed for lipoplexes, a variety of small molecule (such as GalNAc, RGD and folate) and biologic targeting ligands (such as transferrin and antibodies) have been conjugated to PEG-modified polyplexes for tissues selective targeting.

[0355] The most commonly used polymer for polyplexes- and the originator of the proton sponge mechanism—is polyethylenimine (PEI). PEI's high density of amine groups endows it with high charge density and a continuum of amine pKa's that buffer in the entire pH range of the endosome. The buffering capacity of PEI has been mimicked by the addition of weakly basic imidazole groups.

[0356] Oligonucleotide vehicle formulation. The solution conditions in which the oligonucleotide is dissolved, or its delivery vehicle is dispersed may play a role in its delivery. Hypotonic and hypertonic solution conditions may aid in cytoplasmic delivery for systemic and locally administration.

[0357] Another class of molecules that can be conjugated in order to increases circulation times is the attachment of lipophilic groups such as cholesterol or other lipophilic moiety with >12 carbons which interact with serum components such as albumen and lipoproteins thereby increasing circulation times and passive accumulation in the liver. It should be remembered that extensive PS modification increases circulation times through associations with serum components, with roughly 10 PS groups required for serum binding.

[0358] Delivery Vehicles based upon complexation of nucleic acid. Complexation of oligonucleotide therapeutics with cationic agents inhibits nuclease from degrading the oligonucleotide by forming a steric barrier and by inhibiting nuclease binding by neutralizing anionic charge. The process of forming compact particles of nucleic acids from their extended chains is called condensation, which may be achieved by the addition of multiply-charged cationic species. Multiple positive charges can either be covalently attached to one another in a polycation or non-covalently associated with one another in a complex such as the surface of a cationic liposome. The resulting polycation-polyanion interaction is a colloidal dispersion where the nucleic acid particles vary in size and shape depending on the nucleic acid and the condensing cation. In general, the particles are greater than 20 nm in size, and—in the absence of agents to modulate surface charge such as polyethylene glycol (PEG)-have surface charges >20 mV.

[0359] Liposomes

[0360] Nucleic acids entrapped in lipids (lipoplexes) may be used as vehicle for the delivery of nucleic acids. Cationic lipids form electrostatic complexes between nucleic acid and lipids. In addition to the cationic lipids, there are typically neutral or anionic helper lipids which are composed of unsaturated fatty acids and are postulated to assist in fusion between the lipoplex and the cellular membrane, and PEGylated lipids, which prevent aggregation during formulation and storage and non-specific interactions in vivo.

[0361] Lipids are water insoluble and nucleic acids are organic solvent insoluble. To mix these components in a controlled manner such that formulations are repeatable and relatively homogenous in size, detergents or water-miscible organic solvents such as ethanol are used. After formation of electrostatically-associated complexes, the amphipathic detergent or solvent is then removed by dialysis or solvent exchange. Depending on the components and the mixing procedure is possible to formulate lipoplexes that are well less than 100 nm.

[0362] Although the transfection efficiencies of lipoplexes are difficult to predict and optimization is empirical, there are a few design features that have been identified to aid transfection efficiency in vivo: pH-sensitive cationic lipids, the use of unsaturation in the lipid chains and the hydrophobic-hydrophilic balance of PEG-lipids to balance circulation times and transfection efficiencies.

[0363] There have been several studies that have shown a correlation between the pKa of the amine groups of the cationic lipid, which is buffer in the range of the endosomal/lysosomal pathway (pH 4-7), and transfection ability. To synthesize lipids with such pKa values, lipids commonly have closely-spaced amines or imidazole groups. The effect of these weakly basic amine groups in the lipoplexes produces several attractive attributes that facilitate in vivo transfection: reduced surface charge at neutral pH thereby decreasing nonspecific interactions in vivo, increased surface charge in acid environment of endosomes and lysosomes thereby increasing electrostatic interactions with the cellular membrane in these compartments and providing buffering groups that can provide endosomolytic activity via the proton sponge mechanism.

[0364] Another common motif observed in cationic and helper lipids used in lipoplexes is the presence of unsaturation in their component fatty acids with oleic (18 carbon chain with one double bond) and linoleic (18 carbons with 2 double bonds) being very common. The incorporation of these groups increases fluidity of membranes, aids in the formation of fusogenic lipid structures and facilitates the release of cationic lipids from nucleic acids.

[0365] PEG-conjugated lipids are incorporated into lipoplexes to aid in the formation of nonaggregating small complexes and for the prevention of nonspecific interactions in vivo. Due to the hydrophilicity of PEG, their lipid conjugates are not permanently associated with lipoplexes and diffuse from the complexes with dilution and interaction with amphiphilic components in vivo. This loss of PEG shielding from the surface of the lipoplexes aids in transfection efficiency. In general, longer saturated fatty acid chains increase circulation while unsaturation and shorter chains decrease circulation.

[0366] For ease of exposition the formulations, compositions and methods in this section are discussed largely with regard to unmodified siRNA compounds. It may be understood, however, that these formulations, compositions and methods can be practiced with other siRNA compounds, e.g., modified siRNAs. An siRNA compound, e.g., a double-stranded siRNA compound, or ssiRNA compound, (e.g., a precursor, e.g., a larger siRNA compound which can be processed into a ssiRNA compound, or a DNA which encodes an siRNA compound, e.g., a double-stranded siRNA compound, or ssiRNA compound, or precursor thereof) preparation can be formulated for delivery in a membranous molecular assembly, e.g., a liposome or a micelle. As used herein, the term “liposome” refers to a vesicle composed of amphiphilic lipids arranged in at least one bilayer, e.g., one bilayer or a plurality of bilayers. Liposomes include unilamellar and multilamellar vesicles that have a membrane formed from a lipophilic material and an aqueous interior. The aqueous portion contains the siRNA composition. The lipophilic material isolates the aqueous interior from an aqueous exterior, which typically does not include the siRNA composition, although in some examples, it may. Liposomes are useful for the transfer and delivery of active ingredients to the site of action. Because the liposomal membrane is structurally similar to biological membranes, when liposomes are applied to a tissue, the liposomal bilayer fuses with bilayer of the cellular membranes. As the merging of the liposome and cell progresses, the internal aqueous contents that include the siRNA are delivered into the cell where the siRNA can specifically bind to a target RNA and can mediate RNAi. In some cases the liposomes are also specifically targeted, e.g., to direct the siRNA to particular cell types.

[0367] A liposome containing a siRNA can be prepared by a variety of methods. In one example, the lipid component of a liposome is dissolved in a detergent so that micelles are formed with the lipid component. For example, the lipid component can be an amphipathic cationic lipid or lipid conjugate. The detergent can have a high critical micelle concentration and may be nonionic. Exemplary detergents include cholate, CHAPS, octylglucoside, deoxycholate, and lauroyl sarcosine. The siRNA preparation is then added to the micelles that include the lipid component. The cationic groups on the lipid interact with the siRNA and condense around the siRNA to form a liposome. After condensation, the detergent is removed, e.g., by dialysis, to yield a liposomal preparation of siRNA.

[0368] If necessary, a carrier compound that assists in condensation can be added during the condensation reaction, e.g., by controlled addition. For example, the carrier compound can be a polymer other than a nucleic acid (e.g., spermine or spermidine). The pH can also be adjusted to favor condensation.

[0369] Further description of methods for producing stable polynucleotide delivery vehicles, which incorporate a polynucleotide/cationic lipid complex as structural components of the delivery vehicle, are described in, e.g., WO 96/37194. Liposome formation can also include one or more aspects of exemplary methods described in Feigner, P. L. et al., Proc. Natl. Acad. Sci., USA 8:7413-7417, 1987; U.S. Pat. Nos. 4,897,355; 5,171,678; Bangham, et al. M. Mol. Biol. 23:238, 1965; Olson, et al. Biochim. Biophys. Acta 557:9, 1979; Szoka, et al. Proc. Natl. Acad. Sci. 75: 4194, 1978; Mayhew, et al. Biochim. Biophys. Acta 775: 169, 1984; Kim, et al. Biochim. Biophys. Acta 728:339, 1983; and Fukunaga, et al. Endocrinol. 115:757, 1984.

[0370] Commonly used techniques for preparing lipid aggregates of appropriate size for use as delivery vehicles include sonication and freeze-thaw plus extrusion (see, e.g., Mayer, et al. Biochim. Biophys. Acta 858: 161, 1986). Microfluidization can be used when consistently small (50 to 200 nm) and relatively uniform aggregates are desired (Mayhew, et al. Biochim. Biophys. Acta 775: 169, 1984). These methods are readily adapted to packaging siRNA preparations into liposomes.

[0371] Liposomes that are pH-sensitive or negatively-charged entrap nucleic acid molecules rather than complex with them. Since both the nucleic acid molecules and the lipid are similarly charged, repulsion rather than complex formation occurs. Nevertheless, some nucleic acid molecules are entrapped within the aqueous interior of these liposomes. pH-sensitive liposomes have been used to deliver DNA encoding the thymidine kinase gene to cell monolayers in culture. Expression of the exogenous gene was detected in the target cells (Zhou et al., Journal of Controlled Release, 19, (1992) 269-274). One major type of liposomal composition includes phospholipids other than naturally-derived phosphatidylcholine. Neutral liposome compositions, for example, can be formed from dimyristoyl phosphatidylcholine (DMPC) or dipalmitoyl phosphatidylcholine (DPPC). Anionic liposome compositions generally are formed from dimyristoyl phosphatidylglycerol, while anionic fusogenic liposomes are formed primarily from dioleoyl phosphatidylethanolamine (DOPE). Another type of liposomal composition is formed from phosphatidylcholine (PC) such as, for example, soybean PC, and egg PC. Another type is formed from mixtures of phospholipid and/or phosphatidylcholine and/or cholesterol. Examples of other methods to introduce liposomes into cells in vitro and include U.S. Pat. Nos. 5,283,185; 5,171,678; WO 94/00569; WO 93/24640; WO 91/16024; Feigner, J. Biol. Chem. 269:2550, 1994; Nabel, Proc. Natl. Acad. Sci. 90: 11307, 1993; Nabel, Human Gene Ther. 3:649, 1992; Gershon, Biochem. 32:7143, 1993; and Strauss EMBO J. 11:417, 1992. In some embodiments, cationic liposomes are used. Cationic liposomes possess the advantage of being able to fuse to the cell membrane. Non-cationic liposomes, although not able to fuse as efficiently with the plasma membrane, are taken up by macrophages in vivo and can be used to deliver siRNAs to macrophages. Further advantages of liposomes include: liposomes obtained from natural phospholipids are biocompatible and biodegradable; liposomes can incorporate a wide range of water and lipid soluble drugs; liposomes can protect encapsulated siRNAs in their internal compartments from metabolism and degradation (Rosoff, in “Pharmaceutical Dosage Forms,” Lieberman, Rieger and Banker (Eds.), 1988, volume 1, p. 245). Important considerations in the preparation of liposome formulations are the lipid surface charge, vesicle size and the aqueous volume of the liposomes.

[0372] A positively charged synthetic cationic lipid, N-[1-(2,3-dioleyloxy)propyl]-N,N,N-trimethylammonium chloride (DOTMA) can be used to form small liposomes that interact spontaneously with nucleic acid to form lipid-nucleic acid complexes which are capable of fusing with the negatively charged lipids of the cell membranes of tissue culture cells, resulting in delivery of siRNA (see, e.g., Feigner, P. L. et al., Proc. Natl. Acad. Sci., USA 8:7413-7417, 1987 and U.S. Pat. No. 4,897,355 for a description of DOTMA and its use with DNA).

[0373] A DOTMA analogue, 1,2-bis(oleoyloxy)-3-(trimethylammonia)propane (DOTAP) can be used in combination with a phospholipid to form DNA-complexing vesicles. Lipofectin™ Bethesda Research Laboratories, Gaithersburg, Md.) is an effective agent for the delivery of highly anionic nucleic acids into living tissue culture cells that comprise positively charged DOTMA liposomes which interact spontaneously with negatively charged polynucleotides to form complexes. When enough positively charged liposomes are used, the net charge on the resulting complexes is also positive. Positively charged complexes prepared in this way spontaneously attach to negatively charged cell surfaces, fuse with the plasma membrane, and efficiently deliver functional nucleic acids into, for example, tissue culture cells. Another commercially available cationic lipid, 1,2-bis(oleoyloxy)-3,3-(trimethylammonia)propane (“DOTAP”) (Boehringer Mannheim, Indianapolis, Ind.) differs from DOTMA in that the oleoyl moieties are linked by ester, rather than ether linkages.

[0374] Other reported cationic lipid compounds include those that have been conjugated to a variety of moieties including, for example, carboxyspermine which has been conjugated to one of two types of lipids and includes compounds such as 5-carboxyspermylglycine dioctaoleoylamide (“DOGS”) (Transfectam™, Promega, Madison, Wis.) and dipalmitoylphosphatidylethanolamine 5-carboxyspermyl-amide (“DPPES”) (see, e.g., U.S. Pat. No. 5,171,678).

[0375] Another cationic lipid conjugate includes derivatization of the lipid with cholesterol (“DC-Choi”) which has been formulated into liposomes in combination with DOPE (See, Gao, X. and Huang, L., Biochim. Biophys. Res. Commun. 179:280, 1991). Lipopolylysine, made by conjugating polylysine to DOPE, has been reported to be effective for transfection in the presence of serum (Zhou, X. et al., Biochim. Biophys. Acta 1065:8, 1991). For certain cell lines, these liposomes containing conjugated cationic lipids, are said to exhibit lower toxicity and provide more efficient transfection than the DOTMA-containing compositions. Other commercially available cationic lipid products include DMRIE and DMRIE-HP (Vical, La Jo 11a, California) and Lipofectamine (DOSPA) (Life Technology, Inc., Gaithersburg, Md.). Other cationic lipids suitable for the delivery of oligonucleotides are described in WO 98/39359 and WO 96/37194.

[0376] Liposomal formulations are particularly suited for topical administration, liposomes present several advantages over other formulations. Such advantages include reduced side effects related to high systemic absorption of the administered drug, increased accumulation of the administered drug at the desired target, and the ability to administer siRNA, into the skin. In some implementations, liposomes are used for delivering siRNA to epidermal cells and also to enhance the penetration of siRNA into dermal tissues, e.g., into skin. For example, the liposomes can be applied topically. Topical delivery of drugs formulated as liposomes to the skin has been documented (see, e.g., Weiner et al., Journal of Drug Targeting, 1992, vol. 2,405-410 and du Plessis et al., Antiviral Research, 18, 1992, 259-265; Mannino, R. J. and Fould-Fogerite, S., Biotechniques 6:682-690, 1988; Itani, T. et al. Gene 56:267-276. 1987; Nicolau, C. et al. Meth. Enz. 149: 157-176, 1987; Straubinger, R. M. and Papahadjopoulos, D. Meth. Enz. 101:512-527, 1983; Wang, C. Y. and Huang, L., Proc. Natl. Acad. Sci. USA 84:7851-7855, 1987).

[0377] Non-ionic liposomal systems have also been examined to determine their utility in the delivery of drugs to the skin, in particular systems comprising non-ionic surfactant and cholesterol. Non-ionic liposomal formulations comprising Novasome I (glyceryl dilaurate/cholesterol/polyoxyethylene-10-stearyl ether) and Novasome II (glyceryl distearate/cholesterol/polyoxyethylene-10-stearyl ether) were used to deliver a drug into the dermis of mouse skin. Such formulations with siRNA are useful for treating a dermatological disorder.

[0378] Liposomes that include siRNA can be made highly deformable. Such deformability can enable the liposomes to penetrate through pore that are smaller than the average radius of the liposome. For example, transfersomes are a type of deformable liposomes. Transferosomes can be made by adding surface edge activators, usually surfactants, to a standard liposomal composition. Transfersomes that include siRNA can be delivered, for example, subcutaneously by infection in order to deliver siRNA to keratinocytes in the skin. In order to cross intact mammalian skin, lipid vesicles must pass through a series of fine pores, each with a diameter less than 50 nm, under the influence of a suitable transdermal gradient. In addition, due to the lipid properties, these transferosomes can be self-optimizing (adaptive to the shape of pores, e.g., in the skin), self-repairing, and can frequently reach their targets without fragmenting, and often self-loading.

[0379] Other formulations are described in U.S. provisional application Ser. No. 61/018,616, filed Jan. 2, 2008; 61/018,611, filed Jan. 2, 2008; 61/039,748, filed Mar. 26, 2008; 61/047,087, filed Apr. 22, 2008 and 61/051,528, filed May 8, 2008. PCT application no PCT/US2007/080331, filed Oct. 3, 2007 also describes formulations.

[0380] Surfactants

[0381] For ease of exposition the formulations, compositions and methods in this section are discussed largely with regard to unmodified siRNA compounds. It may be understood, however, that these formulations, compositions and methods can be practiced with other siRNA compounds, e.g., modified siRNA compounds, and such practice is within the scope described herein. Surfactants find wide application in formulations such as emulsions (including microemulsions) and liposomes. siRNA (or a precursor, e.g., a larger dsiRNA which can be processed into a siRNA, or a DNA which encodes a siRNA or precursor) compositions can include a surfactant. In some embodiments, the siRNA is formulated as an emulsion that includes a surfactant. The most common way of classifying and ranking the properties of the many different types of surfactants, both natural and synthetic, is by the use of the hydrophile/lipophile balance (HLB). The nature of the hydrophilic group provides the most useful means for categorizing the different surfactants used in formulations (Rieger, in “Pharmaceutical Dosage Forms,” Marcel Dekker, Inc., New York, N.Y., 1988, p. 285).

[0382] If the surfactant molecule is not ionized, it is classified as a nonionic surfactant. Nonionic surfactants find wide application in pharmaceutical products and are usable over a wide range of pH values. In general their HLB values range from 2 to about 18 depending on their structure. Nonionic surfactants include nonionic esters such as ethylene glycol esters, propylene glycol esters, glyceryl esters, polyglyceryl esters, sorbitan esters, sucrose esters, and ethoxylated esters. Nonionic alkanolamides and ethers such as fatty alcohol ethoxylates, propoxylated alcohols, and ethoxylated/propoxylated block polymers are also included in this class. The polyoxy ethylene surfactants are the most popular members of the nonionic surfactant class.

[0383] If the surfactant molecule carries a negative charge when it is dissolved or dispersed in water, the surfactant is classified as anionic. Anionic surfactants include carboxylates such as soaps, acyl lactylates, acyl amides of amino acids, esters of sulfuric acid such as alkyl sulfates and ethoxylated alkyl sulfates, sulfonates such as alkyl benzene sulfonates, acyl isethionates, acyl taurates and sulfo succinates, and phosphates. The most important members of the anionic surfactant class are the alkyl sulfates and the soaps. If the surfactant molecule carries a positive charge when it is dissolved or dispersed in water, the surfactant is classified as cationic. Cationic surfactants include quaternary ammonium salts and ethoxylated amines. The quaternary ammonium salts are the most used members of this class. If the surfactant molecule has the ability to carry either a positive or negative charge, the surfactant is classified as amphoteric. Amphoteric surfactants include acrylic acid derivatives, substituted alkylamides, N-alkylbetaines and phosphatides. The use of surfactants in drug products, formulations and in emulsions has been reviewed (Rieger, in “Pharmaceutical Dosage Forms,” Marcel Dekker, Inc., New York, N.Y., 1988, p. 285).

[0384] Micelles and other Membranous Formulations

[0385] For ease of exposition the micelles and other formulations, compositions and methods in this section are discussed largely with regard to unmodified siRNA compounds. It may be understood, however, that these micelles and other formulations, compositions and methods can be practiced with other siRNA compounds, e.g., modified siRNA compounds. The siRNA compound, e.g., a double-stranded siRNA compound, or ssiRNA compound, (e.g., a precursor, e.g., a larger siRNA compound which can be processed into a ssiRNA compound, or a DNA which encodes an siRNA compound, e.g., a double-stranded siRNA compound, or ssiRNA compound, or precursor thereof)) composition can be provided as a micellar formulation. “Micelles” are defined herein as a particular type of molecular assembly in which amphipathic molecules are arranged in a spherical structure such that all the hydrophobic portions of the molecules are directed inward, leaving the hydrophilic portions in contact with the surrounding aqueous phase. The converse arrangement exists if the environment is hydrophobic.

[0386] A mixed micellar formulation suitable for delivery through transdermal membranes may be prepared by mixing an aqueous solution of the siRNA composition, an alkali metal Cs to C22 alkyl sulphate, and a micelle forming compounds. Exemplary micelle forming compounds include lecithin, hyaluronic acid, pharmaceutically acceptable salts of hyaluronic acid, glycolic acid, lactic acid, chamomile extract, cucumber extract, oleic acid, linoleic acid, linolenic acid, monoolein, monooleates, monolaurates, borage oil, evening of primrose oil, menthol, trihydroxy oxo cholanyl glycine and pharmaceutically acceptable salts thereof, glycerin, polyglycerin, lysine, polylysine, triolein, polyoxy ethylene ethers and analogues thereof, polidocanol alkyl ethers and analogues thereof, chenodeoxycholate, deoxycholate, and mixtures thereof. The micelle forming compounds may be added at the same time or after addition of the alkali metal alkyl sulphate. Mixed micelles will form with substantially any kind of mixing of the ingredients but vigorous mixing in order to provide smaller size micelles.

[0387] In one method a first micellar composition is prepared which contains the siRNA composition and at least the alkali metal alkyl sulphate. The first micellar composition is then mixed with at least three micelle forming compounds to form a mixed micellar composition. In another method, the micellar composition is prepared by mixing the siRNA composition, the alkali metal alkyl sulphate and at least one of the micelle forming compounds, followed by addition of the remaining micelle forming compounds, with vigorous mixing.

[0388] Phenol and/or m-cresol may be added to the mixed micellar composition to stabilize the formulation and protect against bacterial growth. Alternatively, phenol and/or m-cresol may be added with the micelle forming ingredients. An isotonic agent such as glycerin may also be added after formation of the mixed micellar composition.

[0389] For delivery of the micellar formulation as a spray, the formulation can be put into an aerosol dispenser and the dispenser is charged with a propellant. The propellant, which is under pressure, is in liquid form in the dispenser. The ratios of the ingredients are adjusted so that the aqueous and propellant phases become one, i.e., there is one phase. If there are two phases, it is necessary to shake the dispenser prior to dispensing a portion of the contents, e.g., through a metered valve. The dispensed dose of pharmaceutical agent is propelled from the metered valve in a fine spray.

[0390] Propellants may include hydrogen-containing chlorofluorocarbons, hydrogen-containing fluorocarbons, dimethyl ether and diethyl ether. In certain embodiments, HFA 134a (1,1,1,2 tetrafluoroethane) may be used.

[0391] The specific concentrations of the essential ingredients can be determined by relatively straightforward experimentation. For absorption through the oral cavities, it is often desirable to increase, e.g., at least double or triple, the dosage for through injection or administration through the gastrointestinal tract.

[0392] Particles

[0393] For ease of exposition the particles, formulations, compositions and methods in this section are discussed largely with regard to modified siRNA compounds. It may be understood, however, that these particles, formulations, compositions and methods can be practiced with other siRNA compounds, e.g., unmodified siRNA compounds. In some embodiments, an siRNA compound, e.g., a double-stranded siRNA compound, or ssiRNA compound, (e.g., a precursor, e.g., a larger siRNA compound which can be processed into a ssiRNA compound, or a DNA which encodes an siRNA compound, e.g., a double-stranded siRNA compound, or ssiRNA compound, or precursor thereof) preparations may be incorporated into a particle, e.g., a microparticle. Microparticles can be produced by spray-drying, but may also be produced by other methods including lyophilization, evaporation, fluid bed drying, vacuum drying, or a combination of these techniques.

[0394] Pharmaceutical Compositions

[0395] The iRNA agents described herein may be formulated for pharmaceutical use. Pharmaceutically acceptable compositions comprise a therapeutically-effective amount of one or more of the dsRNA agents in any of the preceding embodiments, taken alone or formulated together with one or more pharmaceutically acceptable carriers (additives), excipient and/or diluents.

[0396] The pharmaceutical compositions may be specially formulated for administration in solid or liquid form, including those adapted for the following: (1) oral administration, for example, drenches (aqueous or non-aqueous solutions or suspensions), tablets, e.g., those targeted for buccal, sublingual, and systemic absorption, boluses, powders, granules, pastes for application to the tongue; (2) parenteral administration, for example, by subcutaneous, intramuscular, intravenous or epidural injection as, for example, a sterile solution or suspension, or sustained-release formulation; (3) topical application, for example, as a cream, ointment, or a controlled-release patch or spray applied to the skin; (4) intravaginally or intrarectally, for example, as a pessary, cream or foam; (5) sublingually; (6) ocularly; (7) transdermally; or (8) nasally. Delivery using subcutaneous or intravenous methods can be particularly advantageous.

[0397] The phrase “therapeutically-effective amount” as used herein means that amount of a compound, material, or composition comprising a compound described herein which is effective for producing some desired therapeutic effect in at least a sub-population of cells in an animal at a reasonable benefit/risk ratio applicable to any medical treatment.

[0398] The phrase “pharmaceutically acceptable” is employed herein to refer to those compounds, materials, compositions, and/or dosage forms which are, within the scope of sound medical judgment, suitable for use in contact with the tissues of human beings and animals without excessive toxicity, irritation, allergic response, or other problem or complication, commensurate with a reasonable benefit/risk ratio. The phrase “pharmaceutically-acceptable carrier” as used herein means a pharmaceutically-acceptable material, composition or vehicle, such as a liquid or solid filler, diluent, excipient, manufacturing aid (e.g., lubricant, talc magnesium, calcium or zinc stearate, or steric acid), or solvent encapsulating material, involved in carrying or transporting the subject compound from one organ, or portion of the body, to another organ, or portion of the body. Each carrier must be “acceptable” in the sense of being compatible with the other ingredients of the formulation and not injurious to the patient. Some examples of materials which can serve as pharmaceutically-acceptable carriers include: (1) sugars, such as lactose, glucose and sucrose; (2) starches, such as corn starch and potato starch; (3) cellulose, and its derivatives, such as sodium carboxymethyl cellulose, ethyl cellulose and cellulose acetate; (4) powdered tragacanth; (5) malt; (6) gelatin; (7) lubricating agents, such as magnesium state, sodium lauryl sulfate and talc; (8) excipients, such as cocoa butter and suppository waxes; (9) oils, such as peanut oil, cottonseed oil, safflower oil, sesame oil, olive oil, corn oil and soybean oil; (10) glycols, such as propylene glycol; (11) polyols, such as glycerin, sorbitol, mannitol and polyethylene glycol; (12) esters, such as ethyl oleate and ethyl laurate; (13) agar; (14) buffering agents, such as magnesium hydroxide and aluminum hydroxide; (15) alginic acid; (16) pyrogen-free water; (17) isotonic saline; (18) Ringer's solution; (19) ethyl alcohol; (20) pH buffered solutions; (21) polyesters, polycarbonates and/or polyanhydrides; (22) bulking agents, such as polypeptides and amino acids (23) serum component, such as serum albumin, HDL and LDL; and (22) other non-toxic compatible substances employed in pharmaceutical formulations.

[0399] The formulations may conveniently be presented in unit dosage form and may be prepared by any methods well known in the art of pharmacy. The amount of active ingredient which can be combined with a carrier material to produce a single dosage form will vary depending upon the host being treated, the particular mode of administration. The amount of active ingredient which can be combined with a carrier material to produce a single dosage form will generally be that amount of the compound which produces a therapeutic effect. Generally, out of one hundred percent, this amount will range from about 0.1 percent to about ninety-nine percent of active ingredient, preferably from about 5 percent to about 70 percent, most preferably from about 10 percent to about 30 percent.

[0400] In some embodiments, a formulation comprises an excipient selected from the group consisting of cyclodextrins, celluloses, liposomes, micelle forming agents, e.g., bile acids, and polymeric carriers, e.g., polyesters and polyanhydrides; and a compound described herein. In some embodiments, an aforementioned formulation renders orally bio available a compound described herein.

[0401] An agent preparation can be formulated in combination with another agent, e.g., another therapeutic agent or an agent that stabilizes a iRNA, e.g., a protein that complexes with iRNA to form an iRNP. Still other agents include chelators, e.g., EDTA (e.g., to remove divalent cations such as Mg2+), salts, RNAse inhibitors (e.g., a broad specificity RNAse inhibitor such as RNAsin) and so forth.

[0402] Methods of preparing these formulations or compositions include the step of bringing into association a compound described herein with the carrier and, optionally, one or more accessory ingredients. In general, the formulations are prepared by uniformly and intimately bringing into association a compound described herein with liquid carriers, or finely divided solid carriers, or both, and then, if necessary, shaping the product.

[0403] In some cases, in order to prolong the effect of a drug, it is desirable to slow the absorption of the drug from subcutaneous or intramuscular injection. This may be accomplished by the use of a liquid suspension of crystalline or amorphous material having poor water solubility. The rate of absorption of the drug then depends upon its rate of dissolution which, in turn, may depend upon crystal size and crystalline form. Alternatively, delayed absorption of a parenterally-administered drug form is accomplished by dissolving or suspending the drug in an oil vehicle.

[0404] The compounds described herein may be formulated for administration in any convenient way for use in human or veterinary medicine, by analogy with other pharmaceuticals.

[0405] The term “treatment” is intended to encompass also prophylaxis, therapy and cure. The patient receiving this treatment is any animal in need, including primates, in particular humans, and other mammals such as equines, cattle, swine and sheep; and poultry and pets in general.

[0406] Delivery Vectors

[0407] Naked oligonucleotides are defined as systems that contain no agents that are associated with the nucleic acid either covalently or non-covalently. The absence of any delivery vehicle may require that the oligonucleotide itself be sufficiently nuclease resistant, sufficiently long circulating and cell targeted. For small, solid-phase synthesized oligonucleotides such as those used in antisense oligonucleotides, RNAi, and innate immune stimulators, the use of nucleotide may provide the required drug-like properties. Double-stranded RNAi agents are produced in a cell in vivo, e.g., from exogenous DNA templates that are delivered into the cell. For example, the DNA templates can be inserted into vectors and used as gene therapy vectors. Gene therapy vectors can be delivered to a subject by, for example, intravenous injection, local administration (U.S. Pat. No. 5,328,470), or by stereotactic injection (see, e.g., Chen et al. (1994) Proc. Natl. Acad. Sci. USA 91:3054-3057). The pharmaceutical preparation of the gene therapy vector can include the gene therapy vector in an acceptable diluent, or can comprise a slow release matrix in which the gene delivery vehicle is imbedded. The DNA templates, for example, can include two transcription units, one that produces a transcript that includes the top strand of a dsRNA agent and one that produces a transcript that includes the bottom strand of a dsRNA agent. When the templates are transcribed, the dsRNA agent is produced, and processed into siRNA agent fragments that mediate gene silencing.

### Therapeutic Regimens

[0408] In some embodiments, the pharmaceutical compositions described herein are administered for therapeutic applications.

[0409] In some embodiments, a dsRNA described herein targets SEQ ID NO: 5357 and when administered to a patient in an effective amount reduces eosinophil count. In some cases, the patient comprises nasal polyposis, chronic sinusitis, allergic rhinitis, NSAID-exacerbated respiratory disease, or asthma, or a combination thereof. In some cases, the patient has nasal polyposis. In some cases, the patient has chronic sinusitis. In some cases, the patient has allergic rhinitis. In some cases, the patient has an NSAID-exacerbated respiratory disease. In some cases, the systemic or local eosinophil count is reduced by about 10% or more, as compared to the amount prior to administration. In some cases, the dsRNA is present in a pharmaceutical composition. The pharmaceutical composition may comprise a pharmaceutically acceptable carrier. The dsRNA may comprise a nucleoside modification. The dsRNA may comprise a modified internucleoside linkage.

[0410] In some embodiments, a dsRNA described herein targets SEQ ID NO: 5357 and when administered in an effective amount to a patient comprising nasal polyps, the nasal polyps are reduced in number and/or size in the patient. In some cases, the nasal polyps are reduced in number and/or size by about 10% or more by CT scan or endoscopic assessment, as compared to the number and/or size prior to administration. In some cases, the dsRNA is present in a pharmaceutical composition. The pharmaceutical composition may comprise a pharmaceutically acceptable carrier. The dsRNA may comprise a nucleoside modification. The dsRNA may comprise a modified internucleoside linkage.

[0411] In some embodiments, a dsRNA described herein targets SEQ ID NO: 5357 and when administered to a patient in an effective amount increases nasal inspiratory peak flow in the patient. In some cases, the nasal inspiratory peak flow is increased by about 10% or more as compared to the amount prior to administration. In some cases, the dsRNA is present in a pharmaceutical composition. The pharmaceutical composition may comprise a pharmaceutically acceptable carrier. The dsRNA may comprise a nucleoside modification. The dsRNA may comprise a modified internucleoside linkage.

[0412] In some embodiments, a dsRNA described herein targets SEQ ID NO: 5357 and when administered to a patient in an effective amount to reduce airway symptoms in the patient, wherein the patient comprises nasal polyposis, chronic sinusitis, allergic rhinitis, asthma or NSAID-exacerbated respiratory disease, or a combination thereof. In some cases, the patient has nasal polyposis. In some cases, the patient has chronic sinusitis. In some cases, the patient has allergic rhinitis. In some cases, the patient has an NSAID-exacerbated respiratory disease. In some cases, the airway symptoms are reduced by about 10% or more on a patient-reported outcome measure, as compared to prior to administration. In some cases, the dsRNA is present in a pharmaceutical composition. The pharmaceutical composition may comprise a pharmaceutically acceptable carrier. The dsRNA may comprise a nucleoside modification. The dsRNA may comprise a modified internucleoside linkage.

[0413] In some embodiments, a dsRNA described herein targets SEQ ID NO: 5357 and when administered to a patient in an effective amount to improve sense of smell in the patient, wherein the patient comprises nasal polyposis, chronic sinusitis, allergic rhinitis, asthma, or NSAID-exacerbated respiratory disease, or a combination thereof. In some cases, the patient has nasal polyposis. In some cases, the patient has chronic sinusitis. In some cases, the patient has allergic rhinitis. In some cases, the patient has an NSAID-exacerbated respiratory disease. In some cases, the sense of smell is improved by about 10% or more on a patient-reported outcome measure, as compared to prior to administration. In some cases, the dsRNA is present in a pharmaceutical composition. The pharmaceutical composition may comprise a pharmaceutically acceptable carrier. The dsRNA may comprise a nucleoside modification. The dsRNA may comprise a modified internucleoside linkage.

[0414] In some embodiments, provided is a method of treating one or more disorders of the upper and lower airway in a patient in need thereof, the method comprising administering to the patient an siRNA that targets a portion of mRNA encoding ALOX15, wherein the siRNA comprises a sense strand and an antisense strand, and a double-stranded nucleic acid region, and wherein there is greater than 90% sequence identity or greater than 90% sequence complementarity between the double-stranded nucleic acid region of the siRNA and the portion of mRNA encoding ALOX15 that is targeted by the siRNA; wherein the one or more disorders of the upper and lower airways comprises nasal polyposis, chronic sinusitis, allergic rhinitis, or NSAID-exacerbated respiratory disease, or a combination thereof. In some cases, the portion comprises from about 14 to about 30 contiguous nucleosides of the mRNA encoding ALOX15.

[0415] In some embodiments, a method of treating one or more disorders of the upper and lower airway in a patient in need thereof, the method comprising administering to the patient an agent comprising a siRNA directed towards a ALOX15 target sequence, the siRNA comprising: a) a sense sequence comprising a nucleic acid sequence identical to or substantially identical to the ALOX15 target sequence, wherein the sense strand that is substantially identical to the ALOX15 target sequence differs in identity from the ALOX15 target sequence by no more than five nucleosides; and b) an anti-sense sequence comprising a nucleic acid sequence complementary to or substantially complementary to the ALOX15 target sequence, wherein the antisense strand that is substantially complementary to the ALOX15 target sequence differs in complementarity from the ALOX15 target sequence by no more than five nucleosides; wherein the method is effective in treating the one or more disorders, and the one or more disorders comprises nasal polyposis, chronic sinusitis, allergic rhinitis, asthma or NSAID-exacerbated respiratory disease, or a combination thereof. In some cases, the patient has nasal polyposis. In some cases, the patient has chronic sinusitis. In some cases, the patient has allergic rhinitis. In some cases, the patient has an NSAID-exacerbated respiratory disease. In some cases, the ALOX15 target sequence comprises from about 14 to about 30 contiguous nucleosides of SEQ ID NO: 5357. In some cases, the siRNA is administered in an effective amount to reduce eosinophil count in the patient. In some cases, the siRNA is administered in an effective amount to reduce nasal polyps in the patient. In some cases, the siRNA is administered in an effective amount to reduce eosinophil infiltration in the patient. In some cases, the siRNA is administered in an effective amount to reduce airway inflammation in the patient.

[0416] In some any of the exemplary methods provided, the dsRNA may comprise the formulas and/or patterns described elsewhere herein. For instance, the dsRNA may comprise Formula IA, IB, IIA, IIB, IIIA, IIIB, IVA, IVB, VA, VB, VIA, VIB, VIIA, VIIB, VIIIA, or VIIIB, or a combination thereof. The dsRNA may comprise pattern 1S, 1AS, 2S, 2AS, 3S, 3AS, 4S, 4AS, or 5S, or a combination thereof.

[0417] In some embodiments, the pharmaceutical composition is administered once per day, twice per day, three times per day or more. The pharmaceutical composition is administered daily, every day, every alternate day, five days a week, once a week, every other week, two weeks per month, three weeks per month, once a month, twice a month, three times per month, or more. The pharmaceutical composition is administered for at least 1 month, 2 months, 3 months, 4 months, 5 months, 6 months, 7 months, 8 months, 9 months, 10 months, 11 months, 12 months, 18 months, 2 years, 3 years, or more.

[0418] In some embodiments, one or more pharmaceutical compositions are administered simultaneously, sequentially, or at an interval period of time. In some embodiments, one or more pharmaceutical compositions are administered simultaneously. In some cases, one or more pharmaceutical compositions are administered sequentially. In additional cases, one or more pharmaceutical compositions are administered at an interval period of time (e.g., the first administration of a first pharmaceutical composition is on day one followed by an interval of at least 1, 2, 3, 4, 5, or more days prior to the administration of at least a second pharmaceutical composition).

[0419] In some embodiments, two or more different pharmaceutical compositions are co-administered. In some instances, the two or more different pharmaceutical compositions are co-administered simultaneously. In some cases, the two or more different pharmaceutical compositions are co-administered sequentially without a gap of time between administrations. In other cases, the two or more different pharmaceutical compositions are co-administered sequentially with a gap of about 0.5 hour, 1 hour, 2 hour, 3 hour, 12 hours, 1 day, 2 days, or more between administrations.

[0420] In the case wherein the patient's status does improve, upon the doctor's discretion the administration of the composition is given continuously; alternatively, the dose of the composition being administered is temporarily reduced or temporarily suspended for a certain length of time (i.e., a “drug holiday”). In some instances, the length of the drug holiday varies between 2 days and 1 year, including by way of example only, 2 days, 3 days, 4 days, 5 days, 6 days, 7 days, 10 days, 12 days, 15 days, 20 days, 28 days, 35 days, 50 days, 70 days, 100 days, 120 days, 150 days, 180 days, 200 days, 250 days, 280 days, 300 days, 320 days, 350 days, or 365 days. The dose reduction during a drug holiday is from 10%-100%, including, by way of example only, 10%, 15%, 20%, 25%, 30%, 35%, 40%, 45%, 50%, 55%, 60%, 65%, 70%, 75%, 80%, 85%, 90%, 95%, or 100%.

[0421] Once improvement of the patient's conditions has occurred, a maintenance dose is administered if necessary. Subsequently, the dosage or the frequency of administration, or both, can be reduced, as a function of the symptoms, to a level at which the improved disease, disorder or condition is retained.

[0422] In some embodiments, the amount of a given agent that correspond to such an amount varies depending upon factors such as the particular compound, the severity of the disease, the identity (e.g., weight) of the subject or host in need of treatment, but nevertheless is routinely determined in a manner known in the art according to the particular circumstances surrounding the case, including, e.g., the specific agent being administered, the route of administration, and the subject or host being treated. In some instances, the desired dose is conveniently presented in a single dose or as divided doses administered simultaneously (or over a short period of time) or at appropriate intervals, for example as two, three, four or more sub-doses per day.

[0423] The foregoing ranges are merely suggestive, as the number of variables in regard to an individual treatment regime is large, and considerable excursions from these recommended values are not uncommon. Such dosages is altered depending on a number of variables, not limited to the activity of the compound used, the disease or condition to be treated, the mode of administration, the requirements of the individual subject, the severity of the disease or condition being treated, and the judgment of the practitioner.

[0424] In some embodiments, toxicity and therapeutic efficacy of such therapeutic regimens are determined by standard pharmaceutical procedures in cell cultures or experimental animals, including, but not limited to, the determination of the LD50 (the dose lethal to 50% of the population) and the ED50 (the dose therapeutically effective in 50% of the population). The dose ratio between the toxic and therapeutic effects is the therapeutic index and it is expressed as the ratio between LD50 and ED50. Compounds exhibiting high therapeutic indices are preferred. The data obtained from cell culture assays and animal studies are used in formulating a range of dosage for use in human. The dosage of such compounds lies preferably within a range of circulating concentrations that include the ED50 with minimal toxicity. The dosage varies within this range depending upon the dosage form employed and the route of administration utilized.

[0425] Routes of Delivery

[0426] A composition that includes an iRNA can be delivered to a subject by a variety of routes. Exemplary routes include: intravenous, subcutaneous, topical, rectal, anal, vaginal, nasal, pulmonary, ocular.

[0427] The iRNA molecules described herein can be incorporated into pharmaceutical compositions suitable for administration. Such compositions typically include one or more species of iRNA and a pharmaceutically acceptable carrier. As used herein the language “pharmaceutically acceptable carrier” is intended to include any and all solvents, dispersion media, coatings, antibacterial and antifungal agents, isotonic and absorption delaying agents, and the like, compatible with pharmaceutical administration. The use of such media and agents for pharmaceutically active substances is well known in the art. Except insofar as any conventional media or agent is incompatible with the active compound, use thereof in the compositions is contemplated. Supplementary active compounds can also be incorporated into the compositions.

[0428] The compositions described herein may be administered in a number of ways depending upon whether local or systemic treatment is desired and upon the area to be treated. Administration may be topical (including ophthalmic, vaginal, rectal, intranasal, transdermal), oral or parenteral. Parenteral administration includes intravenous drip, subcutaneous, intraperitoneal or intramuscular injection, or intrathecal or intraventricular administration.

[0429] The route and site of administration may be chosen to enhance targeting. For example, to target muscle cells, intramuscular injection into the muscles of interest would be a logical choice. Lung cells might be targeted by administering the iRNA in aerosol form. The vascular endothelial cells could be targeted by coating a balloon catheter with the iRNA and mechanically introducing the DNA.

[0430] Nasal Delivery Formulations

[0431] Nasal drug delivery has been accomplished using several methods. One of the oldest methods of delivering liquids to the nasal cavity is the use of drops. Drops are advantageous as they are low-cost and relatively straightforward to manufacture. A common method for the nasal administration of liquids on the market today is the use of meter-dosed pump sprays. Meter-dosed pump sprays accurately deliver volumes between 25 and 200 μL. The particle size of the drops from pump sprays is a product of the device, patient handling, as well as the formulation, which varies based on the viscosity and surface tension of the product. Nasal formulations can also be delivered as powders. Powder drug delivery provides a high mass of active ingredients for a given volume.

[0432] Provided herein are compositions of lipoxygenase inhibitors, methods for making the same and methods for treating conditions mediated by lipoxygenase. Lipoxygenase enzymes play an important role in various diseases such as asthma, rheumatoid arthritis, gout, psoriasis, allergic rhinitis, Crohn's disease, respiratory distress syndrome, chronic obstructive pulmonary disease, acne, atherosclerosis, aortic aneurysm, sickle cell disease, acute lung injury, ischemia/reperfusion injury, nasal polyposis and/or inflammatory bowel disease among others. Accordingly, compounds which inhibit lipoxygenase activity are useful in the treatment and/or prevention of such diseases.

[0433] The poor solubility in water of some lipoxygenase inhibitors prevents these beneficial agents from broader use than they would otherwise enjoy if aqueous formulations could be prepared at therapeutically effective concentrations for administration, particularly, formulations for nasal or intratracheal.

[0434] Methods for modification of a poorly soluble or insoluble drug itself in an attempt to render it more suitable for administration include altering the morphology or molecular structure of the drug. Other methods include vehicle modification of a poorly soluble or insoluble drug and include the use of salt formation, co-solvent/solubilization, solid carrier systems, micellization, lipid vesicle, oil-water partitioning, and complexation. One approach for delivering a poorly soluble or insoluble agent is to formulate the drug as a solid particle suspension. Drugs that are insoluble in water can provide the significant benefit of stability when formulated as a suspension of particles in an aqueous medium to create a microparticulate or nanoparticulate suspension. Suspensions of solid particles having effective average size of from about 15 to about 1 micron are commonly referred to as nanosuspensions, and are most suitable for administration. These suspensions generally include small particles of insoluble compounds. Forming small particle compositions of lipoxygenase inhibitors can lead to increased therapeutic efficacy and increased therapeutic applications of the drug. In addition, small particle suspensions can be prepared having higher concentrations of the lipoxygenase inhibitor for later dilution prior to injection. Injectable formulations of lipoxygenase inhibitors could permit its use in treating a broad array of conditions mediated by lipoxygenase.

[0435] Once small particle suspensions having therapeutically effective concentrations of lipoxygenase inhibitors have been prepared, solid concentrates can also be prepared by known methods, such as lyophilization, spray-drying and/or supercritical fluid extraction. These solid concentrates can then be resuspended at the time of administration. Also, these solid concentrates may also be compounded to produce a single dosage form such as tablets, capsules, lozenges, suppositories, coated tablets, capsules, ampoules, suppositories, delayed release formulations, controlled release formulations, extended release formulations, pulsatile release formulations, immediate release formulations, gastroretentive formulations, effervescent tablets, fast melt tablets, oral liquid and sprinkle formulations. The solid concentrates may also be formulated in a form selected from the group consisting of a patch, a powder preparation for inhalation, a suspension, an ointment and an emulsion.

[0436] Small particle compositions lipoxygenase inhibitors can also be formulated in therapeutically effective concentrations for delivery as an aerosol for respiratory delivery to the lungs, as a suspension for topical ophthalmic delivery or as a suspension for intranasal delivery.

[0437] Small particles of can be made using any appropriate method including, but not limited to, precipitation methods, mechanical/physical particle size reduction methods such as milling and homogenization, phospholipids coating methods, surfactant coating methods, spray-drying methods, supercritical fluid methods, and hot melt methods. The processes can be separated into four general categories. Each of the categories of processes share the steps of: (1) dissolving lipoxygenase inhibitor in a water miscible organic solvent to create a first solution; (2) mixing the first solution with a second solution that contains water, to precipitate the lipoxygenase inhibitor to create a pre-suspension; and, optionally, (3) adding energy to the pre-suspension in the form of high-shear mixing or heat to provide a stable form of the lipoxygenase inhibitor having the desired size ranges defined above.

[0438] Like other routes of administration, cyclodextrins and surfactants can be used to increase the solubility of drugs. The most common cyclodextrins are (α-, β-, and γ-cyclodextrins, consisting of 6, 7 and 8 α-1,4-linked glucose units, respectively. The number of these units determines the size of the cavity. Cyclodextrins are capable of forming inclusion complexes with hydrophobic molecules by taking up a whole molecule, or some part of it, into the cavity. The stability of the complex formed depends on how well the guest molecule fits into the cyclodextrin cavity. A composition comprising a lipoxygenase inhibitor and a cyclodextrin may include inclusion complexes of the lipoxygenase inhibitor and the cyclodextrin as well as lipoxygenase inhibitor and cyclodextrin that are not part of inclusion complexes. α-, β-, and γ-cyclodextrins, have limited aqueous solubility and show some toxicity when given by injection. For example, although P-cyclodextrins form the most stable complex with many drugs, they have the lowest water solubility of the cyclodextrins. Therefore, to overcome these shortfalls, the cyclodextrin structure has been chemically modified to generate a safer cyclodextrin derivative with increased solubility. The modifications are typically made at one or more of the 2, 3, or 6 position hydroxyl groups. As used herein, the term “cyclodextrin” is intended to encompass unmodified cyclodextrins as well as chemically modified derivatives thereof.

[0439] Although (α-, β- and γ-cyclodextrins can be used for complex formation with lipoxygenase inhibitors, preferred cyclodextrins are the β- and γ-cyclodextrins and even more preferred are the β-cyclodextrins. Preferred β-cyclodextrins include 2-hydroxypropyl-β-cyclodextrin, methyl-β-cyclodextrin and sulfobutyl derivatized β-cyclodextrin.).

[0440] Examples of surfactants include PEG-based nonionic surfactants polysorbate 20, polysorbate 80 and poloxamers. Additionally, cyclodextrins and surfactants can act as permeation enhancers to increase the bioavailability for poorly permeable drugs. Another approach to providing larger doses is using powder delivery formulations. Depending on the bulk density of the powder, quantities up to about 50 mg can be dosed intranasally. The pH of the solution may be modulated to affect the solubility and permeability of the poorly water-soluble drugs. The nasal mucosa can withstand buffers with pH range of 3-10.

[0441] To increase the residence time for nasal absorption of drugs after delivery, formulators may add viscosity-increasing and mucoadhesive agents to the formulations. To permit effective dosing of the formulation while maintaining an increased residence time, an in-situ gelling formulation may be used, example of a gel forming agents are gellan and pectin. Another strategy is the use of thixotropic rheological properties that have a low viscosity during actuation. Another method of utilizing mucoadhesive excipients in the formulation intended for nasal delivery is to produce microspheres of drug within the excipient.

[0442] Methods Routes for Administration

[0443] Provided herein are methods for nasally administering to the mammal a therapeutically effective amount of the composition. As used herein, nasally administering or nasal administration includes administering the composition to the mucous membranes of the nasal passage or nasal cavity of the patient. As used herein, pharmaceutical compositions for nasal administration of a composition prepared by well-known methods to be administered, for example, as a nasal spray, nasal drop, suspension, gel, ointment, cream or powder. Administration of the composition may also take place using a nasal tampon or nasal sponge.

[0444] For topical administration, suitable formulations may include biocompatible oil, wax, gel, powder, polymer, or other liquid or solid carriers. Such formulations may be administered by applying directly to affected tissues, for example, a liquid formulation to treat infection of conjunctival tissue can be administered drop wise to the subject's eye, or a cream formulation can be administered to a wound site.

[0445] The compositions described herein can be administered parenterally such as, for example, by intravenous, intramuscular, intrathecal or subcutaneous injection. Parenteral administration can be accomplished by incorporating the compositions described herein into a solution or suspension. Such solutions or suspensions may also include sterile diluents such as water for injection, saline solution, fixed oils, polyethylene glycols, glycerine, propylene glycol or other synthetic solvents. Parenteral formulations may also include antibacterial agents such as, for example, benzyl alcohol or methyl parabens, antioxidants such as, for example, ascorbic acid or sodium bisulfite and chelating agents such as EDTA. Buffers such as acetates, citrates or phosphates and agents for the adjustment of tonicity such as sodium chloride or dextrose may also be added. The parenteral preparation can be enclosed in ampules, disposable syringes or multiple dose vials made of glass or plastic.

[0446] Rectal administration includes administering the pharmaceutical compositions into the rectum or large intestine. This can be accomplished using suppositories or enemas. Suppository formulations can easily be made by methods known in the art. For example, suppository formulations can be prepared by heating glycerin to about 120 C, dissolving the pharmaceutical composition in the glycerin, mixing the heated glycerin after which purified water may be added, and pouring the hot mixture into a suppository mold.

[0447] Transdermal administration includes percutaneous absorption of the composition through the skin. Transdermal formulations include patches, ointments, creams, gels, salves and the like.

[0448] In addition to the usual meaning of administering the formulations described herein to any part, tissue or organ whose primary function is gas exchange with the external environment, for purposes of the disclosure, “pulmonary” is also meant to include a tissue or cavity that is contingent to the respiratory tract, in particular, the sinuses. For pulmonary administration, an aerosol formulation containing the active agent, a manual pump spray, nebulizer or pressurized metered-dose inhaler as well as dry powder formulations are contemplated. Suitable formulations of this type can also include other agents, such as antistatic agents, to maintain the disclosed compounds as effective aerosols.

[0449] A drug delivery device for delivering aerosols comprises a suitable aerosol canister with a metering valve containing a pharmaceutical aerosol formulation as described and an actuator housing adapted to hold the canister and allow for drug delivery. The canister in the drug delivery device has a head space representing greater than about 15% of the total volume of the canister. Often, the polymer intended for pulmonary administration is dissolved, suspended or emulsified in a mixture of a solvent, surfactant and propellant. The mixture is maintained under pressure in a canister that has been sealed with a metering valve.

[0450] The pharmaceutical compositions described herein may be co-administered with one or more additional agents separately or in the same formulation. Such additional agents include, for example, anti-histamines, beta agonists (e.g., albuterol), antibiotics, anti-inflammatories (e.g. ibuprofen, prednisone (corticosteroid) or pentoxifylline), anti-fungals, (e.g. Amphotericin B, Fluconazole, Ketoconazol, and Itraconazol), steroids, decongestants, bronchodialators, and the like. The formulation may also contain preserving agents, solubilizing agents, chemical buffers, surfactants, emulsifiers, colorants, odorants and sweeteners.

[0451] The pharmaceutical composition described herein can be used to treat a patient suffering from a condition mediated by lipoxygenase and/or leukotriene activity. In some embodiments, the condition is mediated by 15-lipoxygenase activity. In some embodiments, the condition is an inflammatory condition.

[0452] Conditions mediated by lipoxygenase and/or leukotriene activity include, but are not limited to asthma, rheumatoid arthritis, gout, psoriasis, allergic rhinitis, respiratory distress syndrome, chronic obstructive pulmonary disease, acne, atopic dermatitis, atherosclerosis, aortic aneurysm, sickle cell disease, acute lung injury, ischemia/reperfusion injury, nasal polyposis, inflammatory bowel disease (including, for example, ulcerative colitis and Crohn's disease), irritable bowel syndrome, cancer, tumors, respiratory syncytial virus, sepsis, endotoxin shock and myocardial infarction. In some embodiments, the condition mediated by lipoxygenase and/or leukotriene activity is an inflammatory condition. Inflammatory conditions include, but are not limited to, appendicitis, peptic, gastric or duodenal ulcers, peritonitis, pancreatitis, acute or ischemic colitis, diverticulitis, epiglottitis, achalasia, cholangitis, cholecystitis, hepatitis, inflammatory bowel disease (including, for example, Crohn's disease and ulcerative colitis), enteritis, Whipple's disease, asthma, chronic obstructive pulmonary disease, acute lung injury, ileus (including, for example, post-operative ileus), allergy, anaphylactic shock, immune complex disease, organ ischemia, reperfusion injury, organ necrosis, hay fever, sepsis, septicemia, endotoxic shock, cachexia, hyperpyrexia, eosinophilic granuloma, granulomatosis, sarcoidosis, septic abortion, epididymitis, vaginitis, prostatitis, urethritis, bronchitis, emphysema, rhinitis, cystic fibrosis, pneumonitis, pneumoultramicroscopic silicovolcanoconiosis, alvealitis, bronchiolitis, pharyngitis, pleurisy, sinusitis, influenza, respiratory syncytial virus, herpes, disseminated bacteremia, Dengue fever, candidiasis, malaria, filariasis, amebiasis, hydatid cysts, burns, dermatitis, dermatomyositis, sunburn, urticaria, warts, wheals, vasculitis, angiitis, endocarditis, arteritis, atherosclerosis, thrombophlebitis, pericarditis, myocarditis, myocardial ischemia, periarteritis nodosa, rheumatic fever, Alzheimer's disease, coeliac disease, congestive heart failure, adult respiratory distress syndrome, meningitis, encephalitis, multiple sclerosis, cerebral infarction, cerebral embolism, Guillame-Barre syndrome, neuritis, neuralgia, spinal cord injury, paralysis, uveitis, arthritides, arthralgias, osteomyelitis, fasciitis, Paget's disease, gout, periodontal disease, rheumatoid arthritis, synovitis, myasthenia gravis, thryoiditis, systemic lupus erythematosus, Goodpasture's syndrome, Behcet's syndrome, allograft rejection, graft-versus-host disease, Type I diabetes, ankylosing spondylitis, Berger's disease, Type II diabetes, Retier's syndrome, or Hodgkins disease.

[0453] Nasal Delivery Devices

[0454] For most purposes, a broad distribution of the drug on the mucosal surfaces appears desirable for drugs intended for local action or systemic absorption and for vaccines. In chronic sinusitis and nasal polyposis, targeted delivery to the middle and superior meatuses where the sinus openings are, and where the polyps originate, appears desirable.

[0455] Nasal drug delivery devices: Liquid nasal formulations are often aqueous solutions, but suspensions and emulsions can also be delivered. Liquid formulations are considered convenient particularly for topical indications where humidification counteracts the dryness and crusting often accompanying chronic nasal diseases. In traditional spray pump systems, preservatives are typically required to maintain microbiological stability in liquid formulations.

[0456] Drops delivered with pipette: Drops may be administered by sucking liquid into a glass dropper, inserting the dropper into the nostril with an extended neck before squeezing the rubber top to emit the drops.

[0457] Delivery of liquid with rhinyle catheter and squirt tube: A simple way for a physician or trained assistant to deposit drug in the nose is to insert the tip of a fine catheter or micropipette to the desired area under visual control and squirt the liquid into the desired location.

[0458] Squeeze bottles are mainly used to deliver some over-the counter (OTC) products like topical decongestants. By squeezing a partly air-filled plastic bottle, the drug is atomized when delivered from a jet outlet. The dose and particle size vary with the force applied.

[0459] Metered-dose spray pumps: The pumps typically deliver 100 μl (25-200 μl) per spray, and they offer high reproducibility of the emitted dose and plume geometry in in vitro tests. The particle size and plume geometry can vary within certain limits and depend on the properties of the pump, the formulation, the orifice of the actuator, and the force applied. Traditional spray pumps replace the emitted liquid with air, and preservatives are therefore required to prevent contamination. Pump manufacturers have developed different spray systems that avoid the need for preservatives. These systems use a collapsible bag, a movable piston, or a compressed gas to compensate for the emitted liquid volume. The solutions with a collapsible bag and a movable piston compensating for the emitted liquid volume offer the additional advantage that they can be emitted upside down, without the risk of sucking air into the dip tube and compromising the subsequent spray. This may be useful for some products where the patients are bedridden and where a headdown application is recommended. Some systems have a ball valve at the tip to prevent contamination of the liquid inside the applicator tip. Pumps have been designed with side-actuation. The pump was designed with a shorter tip to avoid contact with the sensitive mucosal surfaces. New designs to reduce the need for priming and re-priming, and pumps incorporating pressure point features to improve the dose reproducibility and dose counters and lock-out mechanisms for enhanced dose control and safety are available. Importantly, the in vivo deposition and clinical performance of metered-dose spray pumps can be enhanced for some applications by adapting the pumps to a novel breath powered “Bi-Directional” delivery technology.

[0460] Single- and duo-dose spray devices: Metered-dose spray pumps require priming and some degree of overfill to maintain dose conformity for the labeled number of doses. For expensive drugs and vaccines intended for single administration or sporadic use and where tight control of the dose and formulation is of particular importance, single-dose or duo-dose spray devices are preferred. A simple variant of a single-dose spray device (MAD) is a nosepiece with a spray tip is fitted to a standard syringe. The liquid drug to be delivered is first drawn into the syringe and then the spray tip is fitted onto the syringe.

[0461] Nasal pressurized metered-dose inhalers (pMDIs): Many drugs intended for local nasal action are delivered by spray pumps, but some have also been delivered as nasal aerosols produced by pMDIs. The particles from a pMDI are released at a high speed and the expansion of a compressed gas. The particles emitted from the traditional pMDIs had a particle velocity much higher than a spray pump (5,200 vs. 1,500 cm/s at a distance 1-2 cm from the actuator tip). The issues related to the high particle speed and “cold Freon effect” have been reduced with hydrofluoroalkane (HFA)-based pMDI for nasal use offering lower particle speeds. Like spray pumps, nasal pMDIs produce a localized deposition on the anterior non-ciliated epithelium of the nasal vestibule and in the anterior parts of the narrow nasal valve, but due to quick evaporation of the spray delivered with a pMDI, noticeable “drip-out” may be less of an issue.

[0462] Powered nebulizers and atomizers: Nebulizers use compressed gasses (air, oxygen, and nitrogen) or ultrasonic or mechanical power to break up medical solutions and suspensions into small aerosol droplets that can be directly inhaled into the mouth or nose. The smaller particles and slow speed of the nebulized aerosol are advocated to increase penetration to the target sites in the middle and superior meatuses and the paranasal sinuses.

[0463] Powder devices: Powder medication formulations can offer advantages, including greater stability than liquid formulations and potential that preservatives may not be required. Powders tend to stick to the moist surface of the nasal mucosa before being dissolved and cleared. The use of bioadhesive excipients or agents that slow ciliary action may decrease clearance rates and improve absorption. A number of factors like moisture sensitivity, solubility, particle size, particle shape, and flow characteristics will impact deposition and absorption.

[0464] The function of nasal powder devices is usually based on one of three principles: 1. Powder sprayers with a compressible compartment to provide a pressure that when released creates a plume of powder particles fairly similar to that of a liquid spray; 2. Breath-actuated inhalers where the subject uses his own breath to inhale the powder into the nostril from a blister or capsule; and 3. Nasal insufflators describe devices consisting of a mouthpiece and a nosepiece that are fluidly connected. Delivery occurs when the subject exhales into the mouthpiece to close the velum, and the airflow carries the powder particles into the nose through the device nosepiece similar to the rhinyle catheter described above. The principle can be applied to different dispersion technologies.

[0465] Dosage

[0466] Described herein are methods of administering a dsRNA agent, e.g., a siRNA agent, to a subject (e.g., a human subject). The method includes administering a unit dose of the dsRNA agent, e.g., a siRNA agent, e.g., double stranded siRNA agent that (a) the double-stranded part is 14-30 nucleotides (nt) long, for example, 21-23 nt, (b) is complementary to a target RNA (e.g., an endogenous or pathogen target RNA), and, optionally, (c) includes at least one 3′ overhang 1-5 nucleotide long. In some embodiments, the unit dose is less than 10 mg per kg of bodyweight, or less than 10, 5, 2, 1, 0.5, 0.1, 0.05, 0.01, 0.005, 0.001, 0.0005, 0.0001, 0.00005 or 0.00001 mg per kg of bodyweight, and less than 200 nmole of RNA agent (e.g., about 4.4×10¹⁶ copies) per kg of bodyweight, or less than 1500, 750, 300, 150, 75, 15, 7.5, 1.5, 0.75, 0.15, 0.075, 0.015, 0.0075, 0.0015, 0.00075, 0.00015 nmole of RNA agent per kg of bodyweight.

[0467] The defined amount can be an amount effective to treat or prevent a disease or disorder, e.g., a disease or disorder associated with the target RNA. The unit dose, for example, can be administered by injection (e.g., intravenous, subcutaneous or intramuscular), an inhaled dose, or a topical application. In some embodiments dosages may be less than 10, 5, 2, 1, or 0.1 mg/kg of body weight.

[0468] In some embodiments, the unit dose is administered less frequently than once a day, e.g., less than every 2, 4, 8 or 30 days. In some embodiments, the unit dose is not administered with a frequency (e.g., not a regular frequency). For example, the unit dose may be administered a single time.

[0469] In some embodiments, the effective dose is administered with other traditional therapeutic modalities. In some embodiments, the subject has a viral infection and the modality is an antiviral agent other than a dsRNA agent, e.g., other than a siRNA agent. In some embodiments, the subject has atherosclerosis and the effective dose of a dsRNA agent, e.g., a siRNA agent, is administered in combination with, e.g., after surgical intervention, e.g., angioplasty.

[0470] In some embodiments, a subject is administered an initial dose and one or more maintenance doses of a dsRNA agent, e.g., a siRNA agent, (e.g., a precursor, e.g., a larger dsRNA agent which can be processed into a siRNA agent, or a DNA which encodes a dsRNA agent, e.g., a siRNA agent, or precursor thereof). The maintenance dose or doses can be the same or lower than the initial dose, e.g., one-half less of the initial dose. A maintenance regimen can include treating the subject with a dose or doses ranging from 0.01 μg to 15 mg/kg of body weight per day, e.g., 10, 1, 0.1, 0.01, 0.001, or 0.00001 mg per kg of bodyweight per day. The maintenance doses are, for example, administered no more than once every 2, 5, 10, or 30 days. Further, the treatment regimen may last for a period of time which will vary depending upon the nature of the particular disease, its severity and the overall condition of the patient. In certain embodiments the dosage may be delivered no more than once per day, e.g., no more than once per 24, 36, 48, or more hours, e.g., no more than once for every 5 or 8 days.

[0471] Following treatment, the patient can be monitored for changes in his condition and for alleviation of the symptoms of the disease state. The dosage of the compound may either be increased in the event the patient does not respond significantly to current dosage levels, or the dose may be decreased if an alleviation of the symptoms of the disease state is observed, if the disease state has been ablated, or if undesired side-effects are observed. The effective dose can be administered in a single dose or in two or more doses, as desired or considered appropriate under the specific circumstances. If desired to facilitate repeated or frequent infusions, implantation of a delivery device, e.g., a pump, semi-permanent stent (e.g., intravenous, intraperitoneal, intracisternal or intracapsular), or reservoir may be advisable.

[0472] In some embodiments, the composition includes a plurality of dsRNA agent species. In some embodiments, the dsRNA agent species has sequences that are non-overlapping and non-adjacent to another species with respect to a naturally occurring target sequence. In some embodiments, the plurality of dsRNA agent species is specific for different naturally occurring target genes. In some embodiments, the dsRNA agent is allele specific.

[0473] The dsRNA agents described herein can be administered to mammals, particularly large mammals such as nonhuman primates or humans in a number of ways.

[0474] In some embodiments, the administration of the dsRNA agent, e.g., a siRNA agent, composition is parenteral, e.g., intravenous (e.g., as a bolus or as a diffusible infusion), intradermal, intraperitoneal, intramuscular, intrathecal, intraventricular, intracranial, subcutaneous, transmucosal, buccal, sublingual, endoscopic, rectal, oral, vaginal, topical, pulmonary, intranasal, urethral or ocular. Administration can be provided by the subject or by another person, e.g., a health care provider. The medication can be provided in measured doses or in a dispenser which delivers a metered dose. Selected modes of delivery are discussed in more detail below.

[0475] Described herein are methods, compositions, and kits, for rectal administration or delivery of dsRNA agents described herein

### Methods of Inhibiting Expression of the Target Gene

[0476] Embodiments described herein also relate to methods for inhibiting the expression of a target gene. The method comprises the step of administering the dsRNA agents in any of the preceding embodiments, in an amount sufficient to inhibit expression of the target gene.

[0477] Described herein are methods of modulating the expression of a target gene in a cell, comprising providing to said cell a dsRNA agent provided herein. In some embodiments, the target gene is ALOX15.

### Kits/Article of Manufacture

[0478] Disclosed herein, in certain embodiments, are kits and articles of manufacture for use with one or more of the compositions and methods described herein. Such kits include a carrier, package, or container that is compartmentalized to receive one or more containers such as vials, tubes, and the like, each of the container(s) comprising one of the separate elements to be used in a method described herein. Suitable containers include, for example, bottles, vials, syringes, and test tubes. In one embodiment, the containers are formed from a variety of materials such as glass or plastic.

[0479] The articles of manufacture provided herein contain packaging materials. Examples of pharmaceutical packaging materials include, but are not limited to, blister packs, bottles, tubes, bags, containers, bottles, and any packaging material suitable for a selected formulation and intended mode of administration and treatment.

[0480] For example, the container(s) include target nucleic acid molecule described herein. Such kits optionally include an identifying description or label or instructions relating to its use in the methods described herein.

[0481] A kit typically includes labels listing contents and/or instructions for use, and package inserts with instructions for use. A set of instructions will also typically be included.

[0482] In one embodiment, a label is on or associated with the container. In one embodiment, a label is on a container when letters, numbers or other characters forming the label are attached, molded or etched into the container itself; a label is associated with a container when it is present within a receptacle or carrier that also holds the container, e.g., as a package insert. In one embodiment, a label is used to indicate that the contents are to be used for a specific therapeutic application. The label also indicates directions for use of the contents, such as in the methods described herein.

[0483] In certain embodiments, the pharmaceutical compositions are presented in a pack or dispenser device which contains one or more unit dosage forms containing a compound provided herein. The pack, for example, contains metal or plastic foil, such as a blister pack. In one embodiment, the pack or dispenser device is accompanied by instructions for administration. In one embodiment, the pack or dispenser is also accompanied with a notice associated with the container in form prescribed by a governmental agency regulating the manufacture, use, or sale of pharmaceuticals, which notice is reflective of approval by the agency of the form of the drug for human or veterinary administration. Such notice, for example, is the labeling approved by the U.S. Food and Drug Administration for prescription drugs, or the approved product insert. In one embodiment, compositions containing a compound provided herein formulated in a compatible pharmaceutical carrier are also prepared, placed in an appropriate container, and labeled for treatment of an indicated condition.

[0484] This disclosure is further illustrated by the following examples, which should not be construed as further limiting.

### EXAMPLES

### Example 1. Determination of Genomic Loci Associated with Eosinophilic Airway Disease Traits

[0485] Approximately 24,000,000 imputed and directly genotyped variants in 4,125 individuals with a diagnosis of nasal polyps and 319,054 controls without a diagnosis of nasal polyps were evaluated. Logistic regression adjusting for age and sex was carried out, and adjusted for population substructure using principal components as covariates. Applicants discovered about 20 genomic loci significantly associated with diagnosis of nasal polyps, which are represented in a Manhattan plot in FIG. 7.

[0486] One cluster of association was at chromosome 17p13.2, encompassing the ALOX15 gene. The most significantly associated variant (rs34210653) at this locus was a low frequency missense variant (minor allele frequency ˜1.7%) in exon 13 of the ALOX15 gene which was consistently associated with the evaluated phenotypes (Table 1). This variant was associated with reduced risk of nasal polyps; carriers of the minor allele of this variant had less than half the risk of nasal polyps as non-carriers (p=2×10\hat{ }−15; OR=0.38). This variant was also associated with reduced risk of chronic rhinosinusitis (p=7×10\hat{ }−12; OR=0.65), allergic rhinitis (p=5×10\hat{ }−9; OR=0.80), asthma (p=9×10\hat{ }−6; OR=0.93) and reduced risk of undergoing sinus surgery including nasal polypectomy (p=5×10\hat{ }−11; OR=0.46). This variant was also associated with reduced blood eosinophil counts (p=2×10\hat{ }−65; beta=−0.02).

TABLE 1
Association of ALOX15 Variant rs34210653 with Disease Traits
ALOX15 rs34210653 (AAF = 0.017)

| | Case | Control | | |
|---|---|---|---|---|
| Phenotype | Count | Count | Effect Size | P Value |
| Nasal Polyps | 4,125 | 319,054 | 0.38 (OR) | 1.8E−15 |
| Chronic Rhinosinusitis | 9,535 | 319,054 | 0.65 (OR) | 7.2E−12 |
| Sinus Surgery | 3,592 | 319,054 | 0.46 (OR) | 5.3E−11 |
| Allergic Rhinitis | 22,509 | 259,537 | 0.80 (OR) | 4.5E−09 |
| Asthma | 41,307 | 281,367 | 0.93 (OR) | 9.1E−06 |
| Eosinophil Count | 324,572 | NA | −0.02 (Beta) | 1.5E−65 |

[0487] In addition to the protective loss of function variant rs34210653, Applicants discovered that a separate, independent ALOX15 variant is associated with risk of these diseases. This variant, rs2255888, is an ALOX15 regulatory variant that is associated with increased expression of ALOX15 in whole blood (FIG. 3). The data used for the analyses presented in FIG. 3 were obtained from: the GTEx Portal (Genotype-Tissue Expression Project, supported by the Common Fund of the Office of the Director of the National Institutes of Health, and by NCI, NHGRI, NHLBI, NIDA, NIMH, and NINDS) on 02/01/18.

[0488] In an analysis conditioning on the loss of function (LOF) variant, the T allele of rs2255888, which is associated with increased expression of ALOX15 in whole blood, is associated with increased risk of nasal polyps (p=7×10\hat{ }−5; OR=1.2) and increased blood eosinophil counts (p=2×10\hat{ }−22; beta=0.004). In combination with the T560M loss of function variant, Applicants have therefore identified an ALOX15 allelic series that modulates risk for nasal polyps and blood eosinophils. This allelic series consist of an ALOX15 loss of function variant (rs34210653) that is associated with decreased risk of nasal polyps, chronic rhinosinusitis, allergic rhinitis, asthma and decreased blood eosinophil counts, and an ALOX15 regulatory variant that increases ALOX15 expression (rs2255888) that is associated with increased risk of nasal polyps and increased blood eosinophil counts, further suggesting therapeutic inhibition of ALOX15 as a novel, genetically-informed method of treatment of nasal polyps and related eosinophilic diseases of the airway.

[0489] Applicants also identified three additional rare variants with evidence for being protein truncating or damaging to the protein and analyzed them collectively in a gene burden test (Table 2). rs113604586 is a rare (AAF 0.003) missense variant that is predicted to be damaging to the protein by 2 separate functional prediction algorithms. rs550406686 is a rare (AAF 0.0006) stop gain variant in ALOX15 at amino acid position 134 (of 662 for full length protein). rs144038526 is a rare (AAF 0.0003) missense variant that has been experimentally shown to reduce ALOX15 catalytic activity.

TABLE 2
Damaging and Loss of Function (LofF) Variants in ALOX15

| | | | Functional | Functional |
|---|---|---|---|---|
| Variant | EAF | Coding Consequence | Effect | Evidence |
| rs34210653 | 0.017 | missense (Thr560Met) | LoF | Experi- |
| | | | | mental |
| rs113604586 | 0.003 | missense (Tyr139Cys) | Damaging | Predicted |
| rs550406686 | 0.0006 | stop gain (Glu134Ter) | LoF | Predicted |
| rs144038526 | 0.0003 | missense (Arg402Trp) | Hypomorph | Experi- |
| | | | | mental |

[0490] Aggregated variants in the burden test (without T560M) are associated with protection from nasal polyps and lower blood eosinophils, confirming that these variants are deleterious (Table 3). When aggregated with T560M carriers, there is an increase in statistical significance and a consistent effect size compared to T560M carriers alone. These results are strongly supportive of the hypothesis that inactivation of ALOX15 is protective for eosinophilic airway disease and that therapeutic inhibition will be efficacious for the treatment of these diseases.

TABLE 3
Gene Burden Association Results for ALOX15

| | ALOX15 | | ALOX15 Burden | | ALOX15 Burden | |
|---|---|---|---|---|---|---|
| | T560M | | (w/o T560M) | | (w/T560M) | |
| Phenotype | Effect Size | P Value | Effect Size | P Value | Effect Size | P Value |
| Nasal | 0.38 (OR) | 1.8E−15 | 0.53 (OR) | 0.0008 | 0.40 (OR) | 8.4E−17 |
| Polyps | | | | | | |
| Eosinophil | −0.02 (Beta) | 1.5E−65 | −0.016 (Beta) | 1.4E−09 | −0.019 (Beta) | 1.3E−72 |
| Count | | | | | | |

[0491] Taking a slightly different approach and as a further demonstration of the power of human genetics to model therapeutic target biology, the ALOX15 associations with eosinophilic airway diseases were placed in the context of approved and investigational therapies targeting these diseases, focusing on the novel Th2 cytokine monoclonal antibodies. Variants in or near ALOX15 (rs34210653), IL13 (rs1881457), IL5RA (rs13090169) and TSLP (rs1898671) were evaluated for association with multiple traits relevant to eosinophilic airways disease. Variants for the Th2 cytokine genes (IL13, IL5RA and TSLP) were selected for inclusion based on being the variants in or near those genes that were most significantly associated with blood eosinophil counts. Linear regression adjusting for age and sex was carried out, adjusting for population substructure using principal components as covariates. Association results with effect sizes and p-values for association testing with nasal polyps, chronic sinusitis, sinus surgery, nasal steroid use, allergic rhinitis, asthma and blood eosinophil counts are shown in Tables 4A and 4B.

TABLE 4A
Association of ALOX15 and IL13 Variants with Disease Traits

| | ALOX15 rs34210653 | | IL13 rs1881457 | |
|---|---|---|---|---|
| | (EAF = 0.017) | | (EAF = 0.77) | |
| Trait | beta | p-value | beta | p-value |
| Nasal polyps | 0.38 (OR) | 1.8E−15 | 0.90 (OR) | 5.9E−04 |
| Chronic | 0.65 (OR) | 7.2E−12 | 0.95 (OR) | 8.8E−03 |
| Rhinosinusitis | | | | |
| Sinus Surgery | 0.46 (OR) | 5.3E−11 | 0.92 (OR) | 0.01 |
| Nasal Steroid | 0.73 (OR) | 3.5E−05 | 0.95 (OR) | 0.04 |
| Use | | | | |
| Allergic | 0.80 (OR) | 4.5E−09 | — | — |
| rhinitis | | | | |
| Asthma | 0.93 (OR) | 9.1E−06 | 0.91 (OR) | 4.7E−21 |
| Eosinophil | −0.02 (beta) | 1.5E−65 | −0.009 (beta) | 2.6E−87 |
| count | | | | |

TABLE 4B
Association of IL5RA and TSLP Variants with Disease Traits

| | IL5RA rs13090169 | | TSLP rs1898671 | |
|---|---|---|---|---|
| | (EAF = 0.89) | | (EAF = 0.68) | |
| Trait | Effect Size | p-value | Effect Size | p-value |
| Nasal polyps | — | — | 0.85 (OR) | 2.4E−12 |
| Chronic | — | — | 0.94 (OR) | 6.5E−05 |
| Rhinosinusitis | | | | |
| Sinus Surgery | — | — | 0.87 (OR) | 3.2E−08 |
| Nasal Steroid | — | — | 0.90 (OR) | 1.3E−07 |
| Use | | | | |
| Allergic | — | — | 0.93 (OR) | 2.5E−14 |
| rhinitis | | | | |
| Asthma | — | — | 0.91 (OR) | 6.3E−31 |
| Eosinophil | −0.004 (beta) | 3.2E−15 | −0.005 (beta) | 2.0E−52 |
| count | | | | |

[0492] Only results where the p value was <0.05 are shown. There is noted variation in the effect allele frequencies (EAF) and functional consequences of the selected genetic variant. Nonetheless, when comparing patterns of association within each target gene, the evidence is strongly supportive of the comparative efficacy of ALOX15 inhibition. In this analysis, ALOX15 compares extremely favorably to the genes targeted by the new generation of biologics for the treatment of eosinophilic airway diseases, and in the majority of comparisons appears to be much more consistent in its effects on the upper airway.

### Example 2. RNA Synthesis and Duplex Annealing

[0493] 1. Oligonucleotide Synthesis: Oligonucleotides were synthesized on an AKTAoligopilot synthesizer or an ABI 394 synthesizer. Commercially available controlled pore glass solid support (dT-CPG, 500A, Prime Synthesis) and RNA phosphoramidites with standard protecting groups, 5′-O-dimethoxytrityl N6-benzoyl-2′-t-butyldimethylsilyl-adenosine-3′-O—N,N′-diisopropyl-2-cyanoethylphosphoramidite, 5′-O-dimethoxytrityl-N4-acetyl-2′-t-butyldimethylsilyl-cytidine-3′-O—N,N′-diisopropyl-2-cyanoethylphosphoramidite, 5′-O-dimethoxytrityl-N2˜isobutryl-2′-t-butyldimethylsilyl-guanosine-3′-O—N,N′-diisopropyl-2-cyanoethylphosphoramidite, and 5′-O-dimethoxytrityl-2′-t-butyldimethylsilyl-uridine-3′-O—N,N′-diisopropyl-2-cyanoethylphosphoramidite (Pierce Nucleic Acids Technologies) were used for the oligonucleotide synthesis unless otherwise specified. The 2′-F phosphoramidites, 5′-O-dimethoxytrityl-N4-acetyl-2′-fluro-cytidine-3′-O—N,N′-diisopropyl-2-cyanoethyl-phosphoramidite and 5′-O-dimethoxytrityl-2′-fluro-uridine-3′-O—N,N′-diisopropyl-2-cyanoethyl-phosphoramidite were purchased from (Promega). All phosphoramidites were used at a concentration of 0.2M in acetonitrile (CH3CN) except for guanosine which was used at 0.2M concentration in 10% THF/ANC (v/v). Coupling/recycling time of 16 minutes was used. The activator was 5-ethyl thiotetrazole (0.75M, American International Chemicals), for the PO-oxidation Iodine/Water/Pyridine was used and the PS-oxidation PADS (2%>) in 2,6-lutidine/ACN (1:1 v/v) was used.

[0494] 2. Deprotection-1 (Nucleobase Deprotection): After completion of synthesis, the support was transferred to a 100 ml glass bottle (VWR). The oligonucleotide was cleaved from the support with simultaneous deprotection of base and phosphate groups with 80 mL of a mixture of ethanolic ammonia [ammonia:ethanol (3:1)] for 6.5 h at 55° C. The bottle was cooled briefly on ice and then the ethanolic ammonia mixture was filtered into a new 250 ml bottle. The CPG was washed with 2×40 mL portions of ethanol/water (1:1 v/v). The volume of the mixture was then reduced to ˜ 30 ml by roto-vap. The mixture was then frozen on dry ice and dried under vacuum on a speed vac.

[0495] 3. Deprotection-II (Removal of 2′ TBDMS group): The dried residue was resuspended in 26 ml of triethylamine, triethylamine trihydro fluoride (TEA.3HF) or pyridine-HF and DMSO (3:4:6) and heated at 60° C. for 90 minutes to remove the tert-butyldimethylsilyl (TBDMS) groups at the 2′ position. The reaction was then quenched with 50 ml of 20 mM sodium acetate and pH adjusted to 6.5, and stored in freezer until purification.

[0496] 4. Analysis: The oligonucleotides were analyzed by high-performance liquid chromatography (HPLC) prior to purification and selection of buffer and column depends on nature of the sequence and/or conjugated ligand.

[0497] 5. HPLC Purification: The ligand conjugated oligonucleotides were purified by reverse phase preparative HPLC. The unconjugated oligonucleotides were purified by anion-exchange HPLC on a TSK gel column packed in house. The buffers were 20 mM sodium phosphate (pH 8.5) in 10% CH3CN (buffer A) and 20 mM sodium phosphate (pH 8.5) in 10% CH3CN, 1M NaBr (buffer B). Fractions containing full-length oligonucleotides were pooled, desalted, and lyophilized. Approximately 0.15 OD of desalted oligonucleotides were diluted in water to 150 μl and then pipetted in special vials for CGE and LC/MS analysis. Compounds were finally analyzed by LC-ESMS and CGE.

[0498] 6. siRNA preparation: For the preparation of siRNA, equimolar amounts of sense and antisense strand were heated in 1×PBS at 95° C. for 5 min and slowly cooled to room temperature. Integrity of the duplex was confirmed by HPLC analysis.

### Example 3. siRNA-Mediated Knockdown of ALOX15 in A549 Cells

[0499] Two siRNAs targeted to the ALOX15 mRNA were demonstrated to downregulate levels of ALOX15 mRNA and 15(S)-HETE (15-hydroxyeicosatetraenoic acid), an arachidonic acid metabolite produced by the ALOX15 gene product 15-lipoxygenase, when administered to cultured A549 cells (a non-small cell lung cancer line).

[0500] A549 cells (Sigma Cat. No. 86012804-1VL, Lot No. 16J012) were thawed and maintained according to the manufacturer's protocol in Ham's F12 medium (Corning Cat. No. 10-080-CV, Lot. No. 19717005) supplemented with 10% Fetal Bovine Serum (Atlanta Biologicals, Cat. No. S11550, Lot. No. D17056). The cells were maintained in a T75 flask and subcultured via trypsinization for one week before seeding for experiments.

[0501] On Day 0, the A549 cells were seeded at 150,000 cells/mL into a Falcon 24-well tissue culture plate (Cat. No. 353047) at 0.5 mL per well. On Day 1, cell culture media in appropriate wells was replaced with fresh media containing 20 ng/mL IL-13 (Sino Biologicals, Cat. No. 10369HNAC5, Lot No. LCL11JU0901).

[0502] Two siRNAs master mixes were prepared; the ALOX15 siRNA master mix contained 350 μL of Opti-MEM and 3.5 μL of a mixture of the two ALOX15 siRNAs (ThermoFisher Cat. No. 4427037-s1288 Lot No. AS02B02D and s1289 Lot No. AS02B02E, 10 μM stock). The negative control siRNA master mix contained 350 μL of Opti-MEM and 3.5 μL of negative control siRNA (ThermoFisher Cat. No. 4390843, Lot No. AS028XCJ, 10 μM stock). Next, 3 μL of TransIT-X2 (Mirus Cat. No. MIR6000, Lot. No. 71113956) was added to each master mix. These were incubated for 15 minutes to allow transfection complexes to form, then 51 μL of the appropriate master mix+TransIT-X2 was added to duplicate wells of A549 cells yielding a final siRNA concentration of 10 nM. The sequence of the ALOX15 siRNA s1288 is as follows: sense strand, 5′-GGAAAUCAUCUAUCGGUAUtt-3′ (SEQ ID NO: 5972), antisense strand, 5′-AUACCGAUAGAUGAUUUCCtt-3′ (SEQ ID NO: 5973). These sequences correspond to SEQ ID NOS: 2851 and 2852, respectively, wherein the two nucleotides at the 3′ end of each sequence are replaced by tt. The sequence of the ALOX15 siRNA s1289 is as follows: sense strand, 5′-GCACACUGUUCGAAGCUGAtt-3′ (SEQ ID NO: 5974), antisense strand, 5′-UCAGCUUCGAACAGUGUGCtt-3′ (SEQ ID NO: 5975). These correspond to SEQ ID NOS: 1667 and 1668, respectively, wherein the two nucleotides at the 3′ end of each sequence are replaced by tt.

[0503] On Day 2, approximately 24 hours post transfection, the wells were supplemented with 10 μM arachidonic acid (Millipore Sigma Cat. No. 10931, Lot No. BCBU4737). On Day 3, approximately 48 hours post transfection, an aliquot of cell supernatant was taken from each well and stored at −80° C. Cells were then lysed using the Cells-to-Ct kit according to the manufacturer's protocol (ThermoFisher Cat. No. 4399002, Lot No. 1707055). In brief, cells were washed with 50 μL using cold 1×PBS and then lysed by adding 49.5 μL of Lysis Solution and 0.5 μL DNase I per well and pipetting up and down 5 times and incubating for 5 minutes at room temperature. The Stop Solution (5 μL/well) was added to each well and mixed by pipetting up and down five times and then incubating at room temperature for 2 minutes. The reverse transcriptase reaction was performed using 22.5 μL of the lysate according to the manufacturer's protocol. Samples were stored at −80° C. until real-time qPCR was performed in triplicate using TaqMan Gene Expression Assays (Applied Biosystems FAMIALOX15 Cat. No. 4331182-Hs00993765_g1, Lot No. P180613-002-C10; VIC/CyclophilinA Cat. No. 4448489-Hs99999904_m1, Lot No. P180613-003-G09) using a BioRad iCycler.

[0504] The cell supernatant was collected 48 hours post siRNA transfection of the A549 cells, and the 15(S)-HETE quantified by ELISA (Cayman Chemical, Cat. No. 534721) according to manufacturer's recommended protocol. Comparison was made between the treatment groups.

[0505] The results are shown in FIGS. 8A and 8B. A decrease in ALOX15 mRNA expression in the A549 cells was observed after transfection with the ALOX15 siRNAs (ALOX15_siRNA) compared to ALOX15 mRNA levels in A549 cells transfected with the non-specific control siRNA (con_siRNA) 48 hours after transfection (p=0.04) (FIG. 8A). A decrease in the amount of 15(S)-HETE in the media from wells containing A549 cells transfected with the ALOX15 siRNAs (ALOX15_siRNA) relative to the amount of 15(S)-HETE in the media from wells containing A549 cells transfected with a non-specific control siRNA (con_siRNA) 48 hours after transfection (p=0.03) was observed (FIG. 8B). These results show that the ALOX15 siRNAs elicited knockdown of ALOX15 mRNA in A549 cells and that the decrease in ALOX15 expression correlated with a decrease in 15(S)-HETE production. These results confirm that siRNA knockdown of ALOX15 mRNA recapitulates the functional effects of the ALOX15 rs34210653 missense variant (T560M) described above. Specifically, both siRNA knockdown of ALOX15 mRNA and a threonine to methionine exchange at position 560 of the ALOX15 protein result in reduced ALOX15-mediated production of 15(S)-HETE.

### Example 4. Selection of Sequences in Order to Identify Therapeutic siRNAs to Downmodulate Expression of the ALOX15 mRNA

[0506] Screening sets were defined based by bioinformatic analysis. The therapeutic siRNA molecule has to target human ALOX15 as well as the ALOX15 sequence of at least one toxicology-relevant species, in this case, the non-human primates (NHP) rhesus and cynomolgus monkeys. The key drivers for the design of the screening set were predicted specificity of the siRNAs against the transcriptome of the relevant species as well as cross-reactivity between species. The bioinformatical approach assumes a canonical siRNA structure. Positions 2-18 (5′-3′) of the sense and antisense strand were used for the specificity calculations. The transcriptome database used to for these analyses was NCBI RefSeq DB release 92 (released January 2019). Predicted specificity in human, rhesus monkey, cynomolgus monkey, mouse, rat and dog was determined for sense (S) and antisense (AS) strand. These were assigned a “specificity score” which considers the likelihood of unintended downregulation of any other transcript by full or partial complementarity of an siRNA strand (up to 4 mismatches within positions 2-18) as well as the number and positions of mismatches. Thus, the predicted most likely off-target(s) for antisense and sense strand of each siRNA can be identified. In addition, the number of potential off-targets is used as an additional specificity factor in the specificity score. It is preferable to identify siRNAs with high specificity and a low number of predicted off-targets.

[0507] In addition to selecting siRNA sequences with high sequence specificity to ALOX15 mRNA, siRNA sequences within the seed region were analyzed for similarity to seed regions of known miRNAs. siRNAs can function in a miRNA like manner via base-pairing with complementary sequences within the 3′-UTR of mRNA molecules. The complementarity typically encompasses the 5′-bases at positions 2-7 of the miRNA (seed region). In order to circumvent siRNAs to act via functional miRNA binding sites, siRNA strands are avoided that contain natural miRNA seed regions. The miRNA database used for these analyses was miRbase R22 (released March 2018). Seed regions identified in miRNAs from human, mouse, rat, rhesus monkey, dog, rabbit and pig are referred to as “conserved”. Combining the “specificity score” with miRNA seed analysis yields the “specificity category”. This is divided into categories 1-4, with 1 having the highest specificity and 4 having the lowest specificity. Each strand of the siRNA is assigned to a specificity category.

[0508] Species cross-reactivity was assessed for human, cynomolgus monkey, rhesus monkey, mouse, rat, dog, and rabbit. The analysis was based on a canonical siRNA design using 19 bases (position 1-19 5′-3′) and/or 17 bases (without considering positions 1 and 19) for cross-reactivity. Full match (FM) as well as single mismatch (SMM) analysis was included.

[0509] Analysis of the human Single Nucleotide Polymorphism (SNP) database (NCBI-DB-SNP Build 151, released October 2017) to identify siRNAs targeting regions with known SNPs was also carried out in order to identify siRNAs that may be non-functional in individuals containing the SNP. Positions 1-19 (5′-3′) of the antisense strand was used for cross-reactivity and human SNP analysis. Information regarding the positions of SNPs within the target sequence as well as minor allele frequency (MAF) in case data was obtained in this analysis.

[0510] Initial analysis of the relevant ALOX15 mRNA sequence revealed few sequences can be identified that fulfill the specificity requirements and at the same time target ALOX15 mRNA in all relevant species. Therefore, it was decided to design independent screening subsets for the therapeutic siRNAs.

[0511] All siRNAs in these subsets recognize the human ALOX15 sequence, as a human cell culture system was selected for determination of in vitro activity. Therefore, all siRNAs in these subsets can be used to target human ALOX15 in a therapeutic setting.

[0512] Exemplary 19mer sequences derived from human ALOX15 mRNA (NM_001140.4) include the first 19 nucleobases of SEQ ID NOS: 1-5349, 5366-5971, 6000-6038, 6050-6074. Prioritizing sequences for target specificity, species cross-reactivity, miRNA seed region sequences and SNPs as described above yields siRNA Subset A. The siRNAs in Subset A have the following characteristics:

[0513] Cross-reactivity: With 19mer in human ALOX15 mRNA, with 17mer/19mer in NHP ALOX15 mRNA

[0514] Specificity category: For human and NHP: - AS2 or better, SS3 or better miRNA seeds: AS+SS strand: - seed region not conserved in human, mouse, and rat and not present in >3 species

[0515] Off-target frequency: ≤20 human off-targets matched with 2 mismatches by antisense strand

SNPs: siRNA target sites do not harbor SNPs with a MAF ≥1% (pos. 2-18)

[0516] Subset A is composed of 77 siRNAs: Sense Strand SEQ ID NOS: 23, 31, 33, 37, 39, 41, 43, 51, 195, 197, 199, 251, 257, 263, 273, 275, 279, 2389, 2391, 2397, 2399, 2409, 2415, 2419, 2421, 2423, 2425, 2427, 2431, 2437, 2439, 2769, 2771, 2773, 2881, 2899, 2903, 2905, 2909, 2913, 2915, 3013, 3015, 3017, 3019, 3027, 3029, 3037, 3039, 3041, 3047, 3053, 3055, 3063, 3065, 3183, 3231, 3233, 3243, 3439, 3443, 3449, 3457, 3461, 3463, 3573, 3703, 3705, 3875, 3889, 3981, 4089, 4265, 4321, 4339, 4347, 4507; Antisense Strand SEQ ID NOS: 24, 32, 34, 38, 40, 42, 44, 52, 196, 198, 200, 252, 258, 264, 274, 276, 280, 2390, 2392, 2398, 2400, 2410, 2416, 2420, 2422, 2424, 2426, 2428, 2432, 2438, 2440, 2770, 2772, 2774, 2882, 2900, 2904, 2906, 2910, 2914, 2916, 3014, 3016, 3018, 3020, 3028, 3030, 3038, 3040, 3042, 3048, 3054, 3056, 3064, 3066, 3184, 3232, 3234, 3244, 3440, 3444, 3450, 3458, 3462, 3464, 3574, 3704, 3706, 3876, 3890, 3982, 4090, 4266, 4322, 4340, 4348, 4508.

[0517] Additional human siRNAs that would cross-react with the mouse ALOX15 mRNA (NM_009660.3) were also identified using bioinformatics. The siRNAs in the human/mouse additional subset (Subset B) has the following characteristics:

[0518] Cross-reactivity: With 19mer in human ALOX15 mRNA

[0519] Specificity category: For human: AS2 or better, SS3 or better

[0520] miRNA seeds: AS+SS strand: seed region not conserved in human, mouse, and rat//not present in >3 species

[0521] Off-target frequency: ≤20 human off-targets matched with 2 mismatches by AS strand

[0522] SNPs: siRNA target sites do not harbor SNPs with a MAF ≥1% (pos. 2-18)

[0523] Cross-reactivity: Mouse: 0 siRNAs (17mer/19mer FM)-11 siRNAs (17mer/19mer SSM)

[0524] Specificity category: For mouse: AS2 or better, SS3 or better

[0525] This human/mouse additional subset, Subset B, is composed of 5 siRNAs: Sense Strand SEQ ID NOS: 53, 2627, 2629, 3355, 3365; Antisense Strand SEQ ID NOS: 54, 2628, 2630, 3356, 3366.

[0526] Additional human siRNAs that would cross-react with the rabbit ALOX15 mRNA (NM_001082282.1) were also identified using bioinformatics. The siRNAs in the human/rabbit additional subset (Subset C) has the following characteristics:

[0527] Cross-reactivity: With 19mer in human ALOX15 mRNA

[0528] Specificity category: For human: AS2 or better, SS3 or better

[0529] miRNA seeds: AS+SS strand: seed region not conserved in human, mouse, and rat//not present in >3 species

[0530] Off-target frequency: ≤20 human off-targets matched with 2 mismatches by AS strand

[0531] SNPs: siRNA target sites do not harbor SNPs with a MAF ≥1% (pos. 2-18)

[0532] Cross-reactivity: Rabbit: 11 siRNAs (17mer/19mer FM)-30 siRNAs (17mer/19mer SMM)

[0533] This human/rabbit additional subset, Subset C, is composed of 14 siRNAs: Sense Strand SEQ ID NOS: 87, 2329, 2379, 2381, 2521, 2525, 2607, 3057, 3061, 3067, 3501, 3503, 3873, 4179; Antisense Strand SEQ ID NOS: 88, 2330, 2380, 2382, 2522, 2526, 2608, 3058, 3062, 3068, 3502, 3504, 3874, 4180.

### Example 5. Chemically Modified ALOX15 siRNAs for Screening

[0534] The sequences of Screening Subsets A-C were synthesized with chemical modifications, with the sense strand having the pattern 5′ fNsmNsfN-mN-fN-mN-fN-fN-fN-mN-fN-mN-fN-mN-fN-mN-fN-mN-fNsmNsmN 3′ (pattern 1S) and antisense strand having the pattern 5′ mNsfN-mN-fN-mN-fN-mN-fN-mN-fN-mN-mN-mN-fN-mN-fN-mN-fN-mNsmNsmN 3′ (pattern 1AS). “N” can be any nucleoside (for example ribose, deoxyribose, or derivatives thereof), “fN” is a 2′ fluoro-modified nucleoside, “mN” is a 2′ O-methyl modified nucleoside, “-” is a phosphodiester and “s” is a phosphorothioate. Sense and antisense strands were annealed to prepare the following siRNAs: ETD00138, ETD00139, ETD00140, ETD00141, ETD00142, ETD00143, ETD00144, ETD00145, ETD00146, ETD00147, ETD00148, ETD00149, ETD00150, ETD00151, ETD00152, ETD00153, ETD00154, ETD00155, ETD00156, ETD00157, ETD00158, ETD00159, ETD00160, ETD00161, ETD00162, ETD00163, ETD00164, ETD00165, ETD00166, ETD00167, ETD00168, ETD00169, ETD00170, ETD00171, ETD00172, ETD00173, ETD00174, ETD00175, ETD00176, ETD00177, ETD00178, ETD00179, ETD00180, ETD00181, ETD00182, ETD00183, ETD00184, ETD00185, ETD00186, ETD00187, ETD00188, ETD00189, ETD00190, ETD00191, ETD00192, ETD00193, ETD00194, ETD00195, ETD00196, ETD00197, ETD00198, ETD00199, ETD00200, ETD00201, ETD00202, ETD00203, ETD00204, ETD00205, ETD00206, ETD00207, ETD00208, ETD00209, ETD00210, ETD00211, ETD00212, ETD00213, ETD00214, ETD00215, ETD00216, ETD00217, ETD00218, ETD00219, ETD00220, ETD00221, ETD00222, ETD00223, ETD00224, ETD00225, ETD00226, ETD00227, ETD00228, ETD00229, ETD00230, ETD00231, ETD00232 and ETD00233. A subset of sequences were synthesized with chemical modifications with the sense strand having the pattern 5′ mNsmNsmN-mN-fN-mN-fN-fN-fN-mN-mN-mN-mN-mN-mN-mN-mN-mN-mNsmNs mN 3′ (pattern 2S) and antisense strand having the pattern 5′ mNsfNsmN-mN-mN-fN-mN-mN-mN-mN-mN-mN-mN-fN-mN-fN-mN-mN-mNsmNsmN 3′ (pattern 3AS). Sense and antisense strands were annealed to prepare the following siRNAs: ETD00234, ETD00235, ETD00236, ETD00237 and ETD00238.

[0535] Table 5A provides a summary of exemplary ALOX15 siRNA nucleic acid sequences. Starting from base sense and antisense strands, such as those provided in SEQ ID NOS: 1-5349, 5366-5971, 6000-6038, 6050-6074, the two 3′ terminal nucleosides were removed from both the sense strand and the antisense strand; and then the terminal 3′ nucleoside of the sense strand was replaced with “A” and the terminal 5′ nucleoside of the antisense strand was replaced with “U.” Table 5A also indicates the species reactivity for each dsRNA, wherein hu is human, NHP is non-human primates, mo is mouse, rab is rabbit, 1 mm is one mismatch.

[0536] Table 5B provides the exemplary ALOX15 siRNA nucleic acid sequences with the chemical modifications described in the present example. In each siRNA, the two bases at the 3′ ends of both the sense and antisense strands were uridine. Uridine was used as the base at the 5′ end of all antisense strands and adenine was used as the base at position 19 of all sense strands. Sense and antisense strands were annealed to prepare the siRNA.

TABLE 5A
ALOX15 siRNA

| | | | Base | siRNA sense | siRNA antisense | siRNA sense | siRNA antisense | Position |
|---|---|---|---|---|---|---|---|---|
| | | Base | antisense | strand after | strand after | strand after | strand after | (ALOX15 |
| | Species | sense strand | strand | 3′ deletion | 3′ deletion | “A” sub | “U” sub | mRNA |
| Duplex Name | Activity | (SEQ ID NO) | (SEQ ID NO) | (SEQ ID NO) | (SEQ ID NO) | (SEQ ID NO) | (SEQ ID NO) | NM 001140) |
| ETD00138 | hu, NHP | 23 | 24 | 5568 | 5669 | 5770 | 5871 | 12 |
| ETD00139 | hu, NHP | 31 | 32 | 5569 | 5670 | 5771 | 5872 | 16 |
| ETD00140 | hu, NHP, | 33 | 34 | 5570 | 5671 | 5772 | 5873 | 17 |
| | mo 1 mm | | | | | | | |
| ETD00141 | hu, NHP, | 37 | 38 | 5571 | 5672 | 5773 | 5874 | 19 |
| | mo 1 mm | | | | | | | |
| ETD00142 | hu, NHP, | 39 | 40 | 5572 | 5673 | 5774 | 5875 | 20 |
| | mo 1 mm | | | | | | | |
| ETD00143 | hu, NHP, | 41 | 42 | 5573 | 5674 | 5775 | 5876 | 21 |
| | mo 1 mm | | | | | | | |
| ETD00144 | hu, NHP, | 43 | 44 | 5574 | 5675 | 5776 | 5877 | 22 |
| | mo 1 mm | | | | | | | |
| ETD00145 | hu, NHP, | 51 | 52 | 5575 | 5676 | 5777 | 5878 | 26 |
| | mo 1 mm | | | | | | | |
| ETD00146 | hu, NHP | 195 | 196 | 5576 | 5677 | 5778 | 5879 | 98 |
| ETD00147 | hu, NHP | 197 | 198 | 5577 | 5678 | 5779 | 5880 | 99 |
| ETD00148 | hu, NHP | 199 | 200 | 5578 | 5679 | 5780 | 5881 | 100 |
| ETD00149 | hu, NHP | 251 | 252 | 5579 | 5680 | 5781 | 5882 | 126 |
| ETD00150 | hu, NHP | 257 | 258 | 5580 | 5681 | 5782 | 5883 | 129 |
| ETD00151 | hu, NHP | 263 | 264 | 5581 | 5682 | 5783 | 5884 | 132 |
| ETD00152 | hu, NHP | 273 | 274 | 5582 | 5683 | 5784 | 5885 | 137 |
| ETD00153 | hu, NHP | 275 | 276 | 5583 | 5684 | 5785 | 5886 | 138 |
| ETD00154 | hu, NHP | 279 | 280 | 5584 | 5685 | 5786 | 5887 | 140 |
| ETD00155 | hu, NHP, | 2389 | 2390 | 5585 | 5686 | 5787 | 5888 | 1195 |
| | rab | | | | | | | |
| ETD00156 | hu, NHP, | 2391 | 2392 | 5586 | 5687 | 5788 | 5889 | 1196 |
| | rab | | | | | | | |
| ETD00157 | hu, NHP | 2397 | 2398 | 5587 | 5688 | 5789 | 5890 | 1199 |
| ETD00158 | hu, NHP | 2399 | 2400 | 5588 | 5689 | 5790 | 5891 | 1200 |
| ETD00159 | hu, NHP | 2409 | 2410 | 5589 | 5690 | 5791 | 5892 | 1205 |
| ETD00160 | hu, NHP | 2415 | 2416 | 5590 | 5691 | 5792 | 5893 | 1208 |
| ETD00161 | hu, NHP | 2419 | 2420 | 5591 | 5692 | 5793 | 5894 | 1210 |
| ETD00162 | hu, NHP | 2421 | 2422 | 5592 | 5693 | 5794 | 5895 | 1211 |
| ETD00163 | hu, NHP | 2423 | 2424 | 5593 | 5694 | 5795 | 5896 | 1212 |
| ETD00164 | hu, NHP | 2425 | 2426 | 5594 | 5695 | 5796 | 5897 | 1213 |
| ETD00165 | hu, NHP | 2427 | 2428 | 5595 | 5696 | 5797 | 5898 | 1214 |
| ETD00166 | hu, NHP | 2431 | 2432 | 5596 | 5697 | 5798 | 5899 | 1216 |
| ETD00167 | hu, NHP | 2437 | 2438 | 5597 | 5698 | 5799 | 5900 | 1219 |
| ETD00168 | hu, NHP | 2439 | 2440 | 5598 | 5699 | 5800 | 5901 | 1220 |
| ETD00169 | hu, NHP | 2769 | 2770 | 5599 | 5700 | 5801 | 5902 | 1385 |
| ETD00170 | hu, NHP | 2771 | 2772 | 5600 | 5701 | 5802 | 5903 | 1386 |
| ETD00171 | hu, NHP | 2773 | 2774 | 5601 | 5702 | 5803 | 5904 | 1387 |
| ETD00172 | hu, NHP | 2881 | 2882 | 5602 | 5703 | 5804 | 5905 | 1441 |
| ETD00173 | hu, NHP | 2899 | 2900 | 5603 | 5704 | 5805 | 5906 | 1450 |
| ETD00174 | hu, NHP | 2903 | 2904 | 5604 | 5705 | 5806 | 5907 | 1452 |
| ETD00175 | hu, NHP | 2905 | 2906 | 5605 | 5706 | 5807 | 5908 | 1453 |
| ETD00176 | hu, NHP | 2909 | 2910 | 5606 | 5707 | 5808 | 5909 | 1455 |
| ETD00177 | hu, NHP | 2913 | 2914 | 5607 | 5708 | 5809 | 5910 | 1457 |
| ETD00178 | hu, NHP | 2915 | 2916 | 5608 | 5709 | 5810 | 5911 | 1458 |
| ETD00179 | hu, NHP | 3013 | 3014 | 5609 | 5710 | 5811 | 5912 | 1507 |
| ETD00180 | hu, NHP | 3015 | 3016 | 5610 | 5711 | 5812 | 5913 | 1508 |
| ETD00181 | hu, NHP | 3017 | 3018 | 5611 | 5712 | 5813 | 5914 | 1509 |
| ETD00182 | hu, NHP | 3019 | 3020 | 5612 | 5713 | 5814 | 5915 | 1510 |
| ETD00183 | hu, NHP, | 3027 | 3028 | 5613 | 5714 | 5815 | 5916 | 1514 |
| | rab | | | | | | | |
| ETD00184 | hu, NHP, | 3029 | 3030 | 5614 | 5715 | 5816 | 5917 | 1515 |
| | rab | | | | | | | |
| ETD00185 | hu, NHP, | 3037 | 3038 | 5615 | 5716 | 5817 | 5918 | 1519 |
| | rab | | | | | | | |
| ETD00186 | hu, NHP, | 3039 | 3040 | 5616 | 5717 | 5818 | 5919 | 1520 |
| | rab | | | | | | | |
| ETD00187 | hu, NHP, | 3041 | 3042 | 5617 | 5718 | 5819 | 5920 | 1521 |
| | rab | | | | | | | |
| ETD00188 | hu, NHP, | 3047 | 3048 | 5618 | 5719 | 5820 | 5921 | 1524 |
| | rab | | | | | | | |
| ETD00189 | hu, NHP, | 3053 | 3054 | 5619 | 5720 | 5821 | 5922 | 1527 |
| | rab | | | | | | | |
| ETD00190 | hu, NHP, | 3055 | 3056 | 5620 | 5721 | 5822 | 5923 | 1528 |
| | rab | | | | | | | |
| ETD00191 | hu, NHP, | 3063 | 3064 | 5621 | 5722 | 5823 | 5924 | 1532 |
| | rab | | | | | | | |
| ETD00192 | hu, NHP, | 3065 | 3066 | 5622 | 5723 | 5824 | 5925 | 1533 |
| | rab | | | | | | | |
| ETD00193 | hu, NHP, | 3183 | 3184 | 5623 | 5724 | 5825 | 5926 | 1592 |
| | rab | | | | | | | |
| ETD00194 | hu, NHP | 3231 | 3232 | 5624 | 5725 | 5826 | 5927 | 1616 |
| ETD00195 | hu, NHP | 3233 | 3234 | 5625 | 5726 | 5827 | 5928 | 1617 |
| ETD00196 | hu, NHP | 3243 | 3244 | 5626 | 5727 | 5828 | 5929 | 1622 |
| ETD00197 | hu, NHP | 3439 | 3440 | 5627 | 5728 | 5829 | 5930 | 1720 |
| ETD00198 | hu, NHP | 3443 | 3444 | 5628 | 5729 | 5830 | 5931 | 1722 |
| ETD00199 | hu, NHP | 3449 | 3450 | 5629 | 5730 | 5831 | 5932 | 1725 |
| ETD00200 | hu, NHP | 3457 | 3458 | 5630 | 5731 | 5832 | 5933 | 1729 |
| ETD00201 | hu, NHP | 3461 | 3462 | 5631 | 5732 | 5833 | 5934 | 1731 |
| ETD00202 | hu, NHP | 3463 | 3464 | 5632 | 5733 | 5834 | 5935 | 1732 |
| ETD00203 | hu, NHP | 3573 | 3574 | 5633 | 5734 | 5835 | 5936 | 1787 |
| ETD00204 | hu, NHP | 3703 | 3704 | 5634 | 5735 | 5836 | 5937 | 1852 |
| ETD00205 | hu, NHP | 3705 | 3706 | 5635 | 5736 | 5837 | 5938 | 1853 |
| ETD00206 | hu, NHP, | 3875 | 3876 | 5636 | 5737 | 5838 | 5939 | 1938 |
| | rab | | | | | | | |
| ETD00207 | hu, NHP | 3889 | 3890 | 5637 | 5738 | 5839 | 5940 | 1945 |
| ETD00208 | hu, NHP | 3981 | 3982 | 5638 | 5739 | 5840 | 5941 | 1991 |
| ETD00209 | hu, NHP | 4089 | 4090 | 5639 | 5740 | 5841 | 5942 | 2045 |
| ETD00210 | hu, NHP | 4265 | 4266 | 5640 | 5741 | 5842 | 5943 | 2133 |
| ETD00211 | hu, NHP | 4321 | 4322 | 5641 | 5742 | 5843 | 5944 | 2161 |
| ETD00212 | hu, NHP | 4339 | 4340 | 5642 | 5743 | 5844 | 5945 | 2170 |
| ETD00213 | hu, NHP | 4347 | 4348 | 5643 | 5744 | 5845 | 5946 | 2174 |
| ETD00214 | hu, NHP | 4507 | 4508 | 5644 | 5745 | 5846 | 5947 | 2254 |
| ETD00215 | hu, mo | 53 | 54 | 5645 | 5746 | 5847 | 5948 | 27 |
| | 1 mm | | | | | | | |
| ETD00216 | hu, mo | 2627 | 2628 | 5646 | 5747 | 5848 | 5949 | 1314 |
| | 1 mm, rab | | | | | | | |
| | 1 mm | | | | | | | |
| ETD00217 | hu, mo | 2629 | 2630 | 5647 | 5748 | 5849 | 5950 | 1315 |
| | 1 mm, rab | | | | | | | |
| | 1 mm | | | | | | | |
| ETD00218 | hu, mo | 3355 | 3356 | 5648 | 5749 | 5850 | 5951 | 1678 |
| | 1 mm | | | | | | | |
| ETD00219 | hu, mo | 3365 | 3366 | 5649 | 5750 | 5851 | 5952 | 1683 |
| | 1 mm | | | | | | | |
| ETD00220 | hu, rab | 87 | 88 | 5650 | 5751 | 5852 | 5953 | 44 |
| | 1 mm | | | | | | | |
| ETD00221 | hu, | 2329 | 2330 | 5651 | 5752 | 5853 | 5954 | 1165 |
| | rab, 1 mm | | | | | | | |
| ETD00222 | hu, rab | 2379 | 2380 | 5652 | 5753 | 5854 | 5955 | 1190 |
| | 1 mm | | | | | | | |
| ETD00223 | hu, rab | 2381 | 2382 | 5653 | 5754 | 5855 | 5956 | 1191 |
| | 1 mm | | | | | | | |
| ETD00224 | hu, rab | 2521 | 2522 | 5654 | 5755 | 5856 | 5957 | 1261 |
| | 1 mm | | | | | | | |
| ETD00225 | hu, rab | 2525 | 2526 | 5655 | 5756 | 5857 | 5958 | 1263 |
| | 1 mm | | | | | | | |
| ETD00226 | hu, rab | 2607 | 2608 | 5656 | 5757 | 5858 | 5959 | 1304 |
| | 1 mm | | | | | | | |
| ETD00227 | hu, NHP, | 3057 | 3058 | 5657 | 5758 | 5859 | 5960 | 1529 |
| | rab | | | | | | | |
| ETD00228 | hu, NHP, | 3061 | 3062 | 5658 | 5759 | 5860 | 5961 | 1531 |
| | rab | | | | | | | |
| ETD00229 | hu, rab | 3067 | 3068 | 5659 | 5760 | 5861 | 5962 | 1534 |
| ETD00230 | hu, rab | 3501 | 3502 | 5660 | 5761 | 5862 | 5963 | 1751 |
| | 1 mm | | | | | | | |
| ETD00231 | hu, rab | 3503 | 3504 | 5661 | 5762 | 5863 | 5964 | 1752 |
| | 1 mm | | | | | | | |
| ETD00232 | hu, rab | 3873 | 3874 | 5662 | 5763 | 5864 | 5965 | 1937 |
| | 1 mm | | | | | | | |
| ETD00233 | hu, rab | 4179 | 4180 | 5663 | 5764 | 5865 | 5966 | 2090 |
| | 1 mm | | | | | | | |
| ETD00234 | hu, NHP, | 3027 | 3028 | 5664 | 5765 | 5866 | 5967 | 1514 |
| | rab | | | | | | | |
| ETD00235 | hu, NHP, | 3037 | 3038 | 5665 | 5766 | 5867 | 5968 | 1519 |
| | rab | | | | | | | |
| ETD00236 | hu, NHP, | 3183 | 3184 | 5666 | 5767 | 5868 | 5969 | 1592 |
| | rab | | | | | | | |
| ETD00237 | hu, NHP | 4265 | 4266 | 5667 | 5768 | 5869 | 5970 | 2133 |
| ETD00238 | hu, mo | 2629 | 2630 | 5668 | 5769 | 5870 | 5971 | 1315 |
| | 1 mm, rab | | | | | | | |
| | 1 mm | | | | | | | |

TABLE 5B
Chemically modified ALOX15 siRNAs derived from Screening Subsets A-C

| | Sense | | | |
|---|---|---|---|---|
| | Strand | | Antisense | Antisense |
| siRNA | SEQ | Sense Strand Sequence | SEQ ID | Strand Sequence |
| Name | ID NO | (5′-3′) | NO | Strand (5′-3′) |
| ETD001 | 5366 | fCsmUsfUmUfGmAfGfCfAmAfG | 5367 | mUsfGsmAfCmCfCmAfUmCfUm |
| 38 | | mAfUmGfGmGfUmCfAsmUsmU | | UmGmCfUmCfAmAfAmGsmUs |
| | | | | mU |
| ETD001 | 5368 | fGsmAsfGmCfAmAfGfAfUmGfG | 5369 | mUsfUsmAfGmAfGmAfCmCfC |
| 39 | | mGfUmCfUmCfUmAfAsmUsmU | | mAmUmCfUmUfGmCfUmCsmU |
| | | | | smU |
| ETD001 | 5370 | fAsmGsfCmAfAmGfAfUfGmGfG | 5371 | mUsfGsmUfAmGfAmGfAmCfC |
| 40 | | mUfCmUfCmUfAmCfAsmUsmU | | mCmAmUfCmUfUmGfCmUsmU |
| | | | | smU |
| ETD001 | 5372 | fCsmAsfAmGfAmUfGfGfGmUfC | 5373 | mUsfCsmGfGmUfAmGfAmGfA |
| 41 | | mUfCmUfAmCfCmGfAsmUsmU | | mCmCmCfAmUfCmUfUmGsmU |
| | | | | smU |
| ETD001 | 5374 | fAsmAsfGmAfUmGfGfGfUmCfU | 5375 | mUsfGsmCfGmGfUmAfGmAfG |
| 42 | | mCfUmAfCmCfGmCfAsmUsmU | | mAmCmCfCmAfUmCfUmUsmU |
| | | | | smU |
| ETD001 | 5376 | fAsmGsfAmUfGmGfGfUfCmUfC | 5377 | mUsfUsmGfCmGfGmUfAmGfA |
| 43 | | mUfAmCfCmGfCmAfAsmUsmU | | mGmAmCfCmCfAmUfCmUsmU |
| | | | | smU |
| ETD001 | 5378 | fGsmAsfUmGfGmGfUfCfUmCfU | 5379 | mUsfAsmUfGmCfGmGfUmAfG |
| 44 | | mAfCmCfGmCfAmUfAsmUsmU | | mAmGmAfCmCfCmAfUmCsmU |
| | | | | smU |
| ETD001 | 5380 | fGsmGsfUmCfUmCfUfAfCmCfG | 5381 | mUsfGsmCfGmGfAmUfGmCfG |
| 45 | | mCfAmUfCmCfGmCfAsmUsmU | | mGmUmAfGmAfGmAfCmCsmU |
| | | | | smU |
| ETD001 | 5382 | fCsmUsfGmGfUmCfGfGfCmCfA | 5383 | mUsfCsmCfCmGfUmGfCmUfGm |
| 46 | | mGfCmAfCmGfGmGfAsmUsmU | | GmCmCfGmAfCmCfAmGsmUs |
| | | | | mU |
| ETD001 | 5384 | fUsmGsfGmUfCmGfGfCfCmAfG | 5385 | mUsfCsmCfCmCfGmUfGmCfUm |
| 47 | | mCfAmCfGmGfGmGfAsmUsmU | | GmGmCfCmGfAmCfCmAsmUs |
| | | | | mU |
| ETD001 | 5386 | fGsmGsfUmCfGmGfCfCfAmGfC | 5387 | mUsfUsmCfCmCfCmGfUmGfCm |
| 48 | | mAfCmGfGmGfGmAfAsmUsmU | | UmGmGfCmCfGmAfCmCsmUs |
| | | | | mU |
| ETD001 | 5388 | fUsmCsfGmGfGmAfAfGfCmGfA | 5389 | mUsfGsmCfCmAfCmAfGmUfCm |
| 49 | | mCfUmGfUmGfGmCfAsmUsmU | | GmCmUfUmCfCmCfGmAsmUs |
| | | | | mU |
| ETD001 | 5390 | fGsmGsfAmAfGmCfGfAfCmUfG | 5391 | mUsfCsmGfGmGfCmCfAmCfAm |
| 50 | | mUfGmGfCmCfCmGfAsmUsmU | | GmUmCfGmCfUmUfCmCsmUs |
| | | | | mU |
| ETD001 | 5392 | fAsmGsfCmGfAmCfUfGfUmGfG | 5393 | mUsfGsmUfGmCfGmGfGmCfC |
| 51 | | mCfCmCfGmCfAmCfAsmUsmU | | mAmCmAfGmUfCmGfCmUsmU |
| | | | | smU |
| ETD001 | 5394 | fCsmUsfGmUfGmGfCfCfCmGfC | 5395 | mUsfGsmCfCmCfCmGfUmGfCm |
| 52 | | mAfCmGfGmGfGmCfAsmUsmU | | GmGmGfCmCfAmCfAmGsmUs |
| | | | | mU |
| ETD001 | 5396 | fUsmGsfUmGfGmCfCfCfGmCfA | 5397 | mUsfUsmGfCmCfCmCfGmUfGm |
| 53 | | mCfGmGfGmGfCmAfAsmUsmU | | CmGmGfGmCfCmAfCmAsmUs |
| | | | | mU |
| ETD001 | 5398 | fUsmGsfGmCfCmCfGfCfAmCfG | 5399 | mUsfCsmUfUmGfCmCfCmCfGm |
| 54 | | mGfGmGfCmAfAmGfAsmUsmU | | UmGmCfGmGfGmCfCmAsmUs |
| | | | | mU |
| ETD001 | 5400 | fCsmCsfAmCfCmUfGfCfGmAfU | 5401 | mUsfAsmGfGmGfUmGfUmAfU |
| 55 | | mCfAmCfCmCfUmGfAsmUsmU | | mUmCmGfCmAfGmGfUmGsmU |
| | | | | smU |
| ETD001 | 5402 | fCsmAsfCmCfUmGfCfGfAmUfA | 5403 | mUsfCsmAfGmGfGmUfGmUfA |
| 56 | | mCfAmCfCmCfUmGfAsmUsmU | | mUmCmGfCmAfGmGfUmGsmU |
| | | | | smU |
| ETD001 | 5404 | fCsmUsfGmCfGmAfUfAfCmAfC | 5405 | mUsfUsmUfCmCfAmGfGmGfU |
| 57 | | mCfCmUfGmGfAmAfAsmUsmU | | mGmUmAfUmCfGmCfAmGsmU |
| | | | | smU |
| ETD001 | 5406 | fUsmGsfCmGfAmUfAfCfAmCfC | 5407 | mUsfUsmUfUmCfCmAfGmGfG |
| 58 | | mCfUmGfGmAfAmAfAsmUsmU | | mUmGmUfAmUfCmGfCmAsmU |
| | | | | smU |
| ETD001 | 5408 | fUsmAsfCmAfCmCfCfUfGmGfA | 5409 | mUsfGsmUfUmAfAmUfUmUfC |
| 59 | | mAfAmUfUmAfAmCfAsmUsmU | | mCmAmGfGmGfUmGfUmAsmU |
| | | | | smU |
| ETD001 | 5410 | fAsmCsfCmCfUmGfGfAfAmAfU | 5411 | mUsfGsmAfCmGfUmUfAmAfU |
| 60 | | mUfAmAfCmGfUmCfAsmUsmU | | mUmUmCfCmAfGmGfGmUsmU |
| | | | | smU |
| ETD001 | 5412 | fCsmCsfUmGfGmAfAfAfUmUfA | 5413 | mUsfCsmGfGmAfCmGfUmUfA |
| 61 | | mAfCmGfUmCfCmGfAsmUsmU | | mAmUmUfUmCfCmAfGmGsmU |
| | | | | smU |
| ETD001 | 5414 | fCsmUsfGmGfAmAfAfUfUmAfA | 5415 | mUsfCsmCfGmGfAmCfGmUfU |
| 62 | | mCfGmUfCmCfGmGfAsmUsmU | | mAmAmUfUmUfCmCfAmGsmU |
| | | | | smU |
| ETD001 | 5416 | fUsmGsfGmAfAmAfUfUfAmAfC | 5417 | mUsfCsmCfCmGfGmAfCmGfUm |
| 63 | | mGfUmCfCmGfGmGfAsmUsmU | | UmAmAfUmUfUmCfCmAsmUs |
| | | | | mU |
| ETD001 | 5418 | fGsmGsfAmAfAmUfUfAfAmCfG | 5419 | mUsfGsmCfCmCfGmGfAmCfGm |
| 64 | | mUfCmCfGmGfGmCfAsmUsmU | | UmUmAfAmUfUmUfCmCsmUs |
| | | | | mU |
| ETD001 | 5420 | fGsmAsfAmAfUmUfAfAfCmGfU | 5421 | mUsfGsmGfCmCfCmGfGmAfCm |
| 65 | | mCfCmGfGmGfCmCfAsmUsmU | | GmUmUfAmAfUmUfUmCsmUs |
| | | | | mU |
| ETD001 | 5422 | fAsmAsfUmUfAmAfCfGfUmCfC | 5423 | mUsfCsmUfGmGfCmCfCmGfGm |
| 66 | | mGfGmGfCmCfAmGfAsmUsmU | | AmCmGfUmUfAmAfUmUsmUs |
| | | | | mU |
| ETD001 | 5424 | fUsmAsfAmCfGmUfCfCfGmGfG | 5425 | mUsfGsmUfCmCfUmGfGmCfCm |
| 67 | | mCfCmAfGmGfAmCfAsmUsmU | | CmGmGfAmCfGmUfUmAsmUs |
| | | | | mU |
| ETD001 | 5426 | fAsmAsfCmGfUmCfCfGfGmGfC | 5427 | mUsfAsmGfUmCfCmUfGmGfC |
| 68 | | mCfAmGfGmAfCmUfAsmUsmU | | mCmCmGfGmAfCmGfUmUsmU |
| | | | | smU |
| ETD001 | 5428 | fGsmUsfGmAfAmGfUfCfUmUfC | 5429 | mUsfAsmUfAmGfAmAfGmGfA |
| 69 | | mCfUmUfCmUfAmUfAsmUsmU | | mAmGmAfCmUfUmCfAmCsmU |
| | | | | smU |
| ETD001 | 5430 | fUsmGsfAmAfGmUfCfUfUmCfC | 5431 | mUsfCsmAfUmAfGmAfAmGfG |
| 70 | | mUfUmCfUmAfUmGfAsmUsmU | | mAmAmGfAmCfUmUfCmAsmU |
| | | | | smU |
| ETD001 | 5432 | fGsmAsfAmGfUmCfUfUfCmCfU | 5433 | mUsfGsmCfAmUfAmGfAmAfG |
| 71 | | mUfCmUfAmUfGmCfAsmUsmU | | mGmAmAfGmAfCmUfUmCsmU |
| | | | | smU |
| ETD001 | 5434 | fGsmUsfAmUfGmUfGfGfAmAfG | 5435 | mUsfAsmCfGmAfUmUfCmCfU |
| 72 | | mGfAmAfUmCfGmUfAsmUsmU | | mUmCmCfAmCfAmUfAmCsmU |
| | | | | smU |
| ETD001 | 5436 | fAsmGsfGmAfAmUfCfGfUmGfA | 5437 | mUsfUsmGfGmAfGmAfCmUfC |
| 73 | | mGfUmCfUmCfCmAfAsmUsmU | | mAmCmGfAmUfUmCfCmUsmU |
| | | | | smU |
| ETD001 | 5438 | fGsmAsfAmUfCmGfUfGfAmGfU | 5439 | mUsfAsmGfUmGfGmAfGmAfC |
| 74 | | mCfUmCfCmAfCmUfAsmUsmU | | mUmCmAfCmGfAmUfUmCsmU |
| | | | | smU |
| ETD001 | 5440 | fAsmAsfUmCfGmUfGfAfGmUfC | 5441 | mUsfUsmAfGmUfGmGfAmGfA |
| 75 | | mCfAmCfUmAfUmAfAsmUsmU | | mGmAmCfUmCfAmCfGmAsmU |
| | | | | smU |
| ETD001 | 5442 | fUsmCsfGmUfGmAfGfUfCmUfC | 5443 | mUsfUsmAfUmAfGmUfGmGfA |
| 76 | | mCfAmCfUmAfUmAfAsmUsmU | | mGmAmCfUmCfAmCfGmAsmU |
| | | | | smU |
| ETD001 | 5444 | fGsmUsfGmAfGmUfCfUfCmCfA | 5445 | mUsfCsmUfUmAfUmAfGmUfG |
| 77 | | mCfUmAfUmAfAmGfAsmUsmU | | mGmAmGfAmCfUmCfAmCsmU |
| | | | | smU |
| ETD001 | 5446 | fUsmGsfAmGfUmCfUfCfCmAfC | 5447 | mUsfUsmCfUmUfAmUfAmGfU |
| 78 | | mUfAmUfAmAfGmAfAsmUsmU | | mGmGmAfGmAfCmUfCmAsmU |
| | | | | smU |
| ETD001 | 5448 | fGsmCsfAmGfAmCfCfUfGmGfU | 5449 | mUsfUsmCfUmCfGmAfCmAfCm |
| 79 | | mGfUmCfGmAfGmAfAsmUsmU | | CmAmGfGmUfCmUfGmCsmUs |
| | | | | mU |
| ETD001 | 5450 | fCsmAsfGmAfCmCfUfGfGmUfG | 5451 | mUsfCsmUfCmUfCmGfAmCfAm |
| 80 | | mUfCmGfAmGfAmGfAsmUsmU | | CmCmAfGmGfUmCfUmGsmUs |
| | | | | mU |
| ETD001 | 5452 | fAsmGsfAmCfCmUfGfGfUmGfU | 5453 | mUsfUsmCfUmCfUmCfGmAfCm |
| 81 | | mCfGmAfGmAfGmAfAsmUsmU | | AmCmCfAmGfGmUfCmUsmUs |
| | | | | mU |
| ETD001 | 5454 | fGsmAsfCmCfUmGfGfUfGmUfC | 5455 | mUsfAsmUfCmUfCmUfCmGfA |
| 82 | | mGfAmGfAmGfAmUfAsmUsmU | | mCmAmCfCmAfGmGfUmCsmU |
| | | | | smU |
| ETD001 | 5456 | fUsmGsfGmUfGmUfCfGfAmGfA | 5457 | mUsfAsmGfUmGfAmUfCmUfC |
| 83 | | mGfAmUfCmAfCmUfAsmUsmU | | mUmCmGfAmCfAmCfCmAsmU |
| | | | | smU |
| ETD001 | 5458 | fGsmGsfUmGfUmCfGfAfGmAfG | 5459 | mUsfCsmAfGmUfGmAfUmCfU |
| 84 | | mAfUmCfAmCfUmGfAsmUsmU | | mCmUmCfGmAfCmAfCmCsmU |
| | | | | smU |
| ETD001 | 5460 | fUsmCsfGmAfGmAfGfAfUmCfA | 5461 | mUsfAsmUfUmUfCmAfGmUfG |
| 85 | | mCfUmGfAmAfAmUfAsmUsmU | | mAmUmCfUmCfUmCfGmAsmU |
| | | | | smU |
| ETD001 | 5462 | fCsmGsfAmGfAmGfAfUfCmAfC | 5463 | mUsfGsmAfUmUfUmCfAmGfU |
| 86 | | mUfGmAfAmAfUmCfAsmUsmU | | mGmAmUfCmUfCmUfCmGsmU |
| | | | | smU |
| ETD001 | 5464 | fGsmAsfGmAfGmAfUfCfAmCfU | 5465 | mUsfCsmGfAmUfUmUfCmAfG |
| 87 | | mGfAmAfAmUfCmGfAsmUsmU | | mUmGmAfUmCfUmCfUmCsmU |
| | | | | smU |
| ETD001 | 5466 | fAsmGsfAmUfCmAfCfUfGmAfA | 5467 | mUsfGsmCfCmCfGmAfUmUfU |
| 88 | | mAfUmCfGmGfGmCfAsmUsmU | | mCmAmGfUmGfAmUfCmUsmU |
| | | | | smU |
| ETD001 | 5468 | fUsmCsfAmCfUmGfAfAfAmUfC | 5469 | mUsfGsmCfAmGfCmCfCmGfAm |
| 89 | | mGfGmGfCmUfGmCfAsmUsmU | | UmUmUfCmAfGmUfGmAsmUs |
| | | | | mU |
| ETD001 | 5470 | fCsmAsfCmUfGmAfAfAfUmCfG | 5471 | mUsfUsmGfCmAfGmCfCmCfGm |
| 90 | | mGfGmCfUmGfCmAfAsmUsmU | | AmUmUfUmCfAmGfUmGsmUs |
| | | | | mU |
| ETD001 | 5472 | fGsmAsfAmAfUmCfGfGfGmCfU | 5473 | mUsfCsmCfCmUfUmGfCmAfGm |
| 91 | | mGfCmAfAmGfGmGfAsmUsmU | | CmCmCfGmAfUmUfUmCsmUs |
| | | | | mU |
| ETD001 | 5474 | fAsmAsfAmUfCmGfGfGfCmUfG | 5475 | mUsfCsmCfCmCfUmUfGmCfAm |
| 92 | | mCfAmAfGmGfGmGfAsmUsmU | | GmCmCfCmGfAmUfUmUsmUs |
| | | | | mU |
| ETD001 | 5476 | fCsmAsfGmGfUmUfUfGfCmCfA | 5477 | mUsfGsmAfCmAfAmAfGmUfG |
| 93 | | mCfUmUfUmGfUmCfAsmUsmU | | mGmCmAfAmAfCmCfUmGsmU |
| | | | | smU |
| ETD001 | 5478 | fUsmGsfUmAfUmCfUfUfCmAfC | 5479 | mUsfGsmGfUmGfCmAfGmGfU |
| 94 | | mCfUmGfCmAfCmCfAsmUsmU | | mGmAmAfGmAfUmAfCmAsmU |
| | | | | smU |
| ETD001 | 5480 | fGsmUsfAmUfCmUfUfCfAmCfC | 5481 | mUsfCsmGfGmUfGmCfAmGfG |
| 95 | | mUfGmCfAmCfCmGfAsmUsmU | | mUmGmAfAmGfAmUfAmCsmU |
| | | | | smU |
| ETD001 | 5482 | fUsmUsfCmAfCmCfUfGfCmAfC | 5483 | mUsfUsmUfGmGfCmCfGmGfU |
| 96 | | mCfGmGfCmCfAmAfAsmUsmU | | mGmCmAfGmGfUmGfAmAsmU |
| | | | | smU |
| ETD001 | 5484 | fAsmAsfCmCfAmCfCfAfAmGfG | 5485 | mUsfGsmUfUmGfCmAfUmCfC |
| 97 | | mAfUmGfCmAfAmCfAsmUsmU | | mUmUmGfGmUfGmGfUmUsmU |
| | | | | smU |
| ETD001 | 5486 | fCsmCsfAmCfCmAfAfGfGmAfU | 5487 | mUsfGsmCfGmUfUmGfCmAfU |
| 98 | | mGfCmAfAmCfGmCfAsmUsmU | | mCmCmUfUmGfGmUfGmGsmU |
| | | | | smU |
| ETD001 | 5488 | fCsmCsfAmAfGmGfAfUfGmCfA | 5489 | mUsfCsmCfAmGfCmGfUmUfG |
| 99 | | mAfCmGfCmUfGmGfAsmUsmU | | mCmAmUfCmCfUmUfGmGsmU |
| | | | | smU |
| ETD002 | 5490 | fGsmGsfAmUfGmCfAfAfCmGfC | 5491 | mUsfGsmUfCmUfCmCfAmGfCm |
| 00 | | mUfGmGfAmGfAmCfAsmUsmU | | GmUmUfGmCfAmUfCmCsmUs |
| | | | | mU |
| ETD002 | 5492 | fAsmUsfGmCfAmAfCfGfCmUfG | 5493 | mUsfCsmUfGmUfCmUfCmCfAm |
| 01 | | mGfAmGfAmCfAmGfAsmUsmU | | GmCmGfUmUfGmCfAmUsmUs |
| | | | | mU |
| ETD002 | 5494 | fUsmGsfCmAfAmCfGfCfUmGfG | 5495 | mUsfAsmCfUmGfUmCfUmCfCm |
| 02 | | mAfGmAfCmAfGmUfAsmUsmU | | AmGmCfGmUfUmGfCmAsmUs |
| | | | | mU |
| ETD002 | 5496 | fCsmAsfGmAfUmGfUfCfCmAfU | 5497 | mUsfCsmCfAmAfGmUfGmAfU |
| 03 | | mCfAmCfUmUfGmGfAsmUsmU | | mGmGmAfCmAfUmCfUmGsmU |
| | | | | smU |
| ETD002 | 5498 | fGsmGsfAmGfGmAfGfUfAmUfU | 5499 | mUsfCsmCfCmGfAmAfAmAfA |
| 04 | | mUfUmUfCmGfGmGfAsmUsmU | | mUmAmCfUmCfCmUfCmCsmU |
| | | | | smU |
| ETD002 | 5500 | fGsmAsfGmGfAmGfUfAfUmUfU | 5501 | mUsfGsmCfCmCfGmAfAmAfA |
| 05 | | mUfUmCfGmGfGmCfAsmUsmU | | mAmUmAfCmUfCmCfUmCsmU |
| | | | | smU |
| ETD002 | 5502 | fUsmCsfCmGfGmAfAfUfGmCfA | 5503 | mUsfCsmCfAmGfCmUfUmUfG |
| 06 | | mAfAmGfCmUfGmGfAsmUsmU | | mCmAmUfUmCfCmGfGmAsmU |
| | | | | smU |
| ETD002 | 5504 | fUsmGsfCmAfAmAfGfCfUmGfG | 5505 | mUsfGsmGfCmAfUmGfUmCfC |
| 07 | | mAfCmAfUmGfCmCfAsmUsmU | | mAmGmCfUmUfUmGfCmAsmU |
| | | | | smU |
| ETD002 | 5506 | fGsmAsfAmAfAmCfAfGfUmGfU | 5507 | mUsfGsmAfUmGfGmCfCmAfC |
| 08 | | mGfGmCfCmAfUmCfAsmUsmU | | mAmCmUfGmUfUmUfUmCsmU |
| | | | | smU |
| ETD002 | 5508 | fCsmAsfCmCfCmAfAfGfCmCfA | 5509 | mUsfCsmAfGmCfUmUfGmUfG |
| 09 | | mCfAmAfGmCfUmGfAsmUsmU | | mGmCmUfUmGfGmGfUmGsmU |
| | | | | smU |
| ETD002 | 5510 | fGsmCsfAmCfCmUfUfUfUmCfA | 5511 | mUsfGsmAfGmAfCmCfAmUfG |
| 10 | | mUfGmGfUmCfUmCfAsmUsmU | | mAmAmAfAmGfGmUfGmCsmU |
| | | | | smU |
| ETD002 | 5512 | fGsmAsfAmCfAmCfAfUfUmUfU | 5513 | mUsfCsmUfAmGfAmGfUmAfA |
| 11 | | mAfCmUfCmUfAmGfAsmUsmU | | mAmAmUfGmUfGmUfUmCsmU |
| | | | | smU |
| ETD002 | 5514 | fUsmUsfAmCfUmCfUfAfGmAfG | 5515 | mUsfGsmUfGmAfUmGfCmCfU |
| 12 | | mGfCmAfUmCfAmCfAsmUsmU | | mCmUmAfGmAfGmUfAmAsmU |
| | | | | smU |
| ETD002 | 5516 | fUsmCsfUmAfGmAfGfGfCmAfU | 5517 | mUsfCsmCfAmGfGmUfGmAfU |
| 13 | | mCfAmCfCmUfGmGfAsmUsmU | | mGmCmCfUmCfUmAfGmAsmU |
| | | | | smU |
| ETD002 | 5518 | fUsmCsfUmUfCmAfUfUfCmAfG | 5519 | mUsfUsmAfUmAfGmAfUmCfU |
| 14 | | mAfUmCfUmAfUmAfAsmUsmU | | mGmAmAfUmGfAmAfGmAsmU |
| | | | | smU |
| ETD002 | 5520 | fGsmUsfCmUfCmUfAfCfCmGfC | 5521 | mUsfCsmGfCmGfGmAfUmGfC |
| 15 | | mAfUmCfCmGfCmGfAsmUsmU | | mGmGmUfAmGfAmGfAmCsmU |
| | | | | smU |
| ETD002 | 5522 | fAsmAsfGmCfUmGfGfAfGmCfC | 5523 | mUsfUsmUfAmGfGmAfAmGfG |
| 16 | | mUfUmCfCmUfAmAfAsmUsmU | | mCmUmCfCmAfGmCfUmUsmU |
| | | | | smU |
| ETD002 | 5524 | fAsmGsfCmUfGmGfAfGfCmCfU | 5525 | mUsfGsmUfUmAfGmGfAmAfG |
| 17 | | mUfCmCfUmAfAmCfAsmUsmU | | mGmCmUfCmCfAmGfCmUsmU |
| | | | | smU |
| ETD002 | 5526 | fUsmUsfGmGfGmUfGfCfCmUfA | 5527 | mUsfGsmGfUmGfCmAfUmUfA |
| 18 | | mAfUmGfCmAfCmCfAsmUsmU | | mGmGmCfAmCfCmCfAmAsmU |
| | | | | smU |
| ETD002 | 5528 | fUsmGsfCmCfUmAfAfUfGmCfA | 5529 | mUsfUsmGfCmAfGmGfGmUfG |
| 19 | | mCfCmCfUmGfCmAfAsmUsmU | | mCmAmUfUmAfGmGfCmAsmU |
| | | | | smU |
| ETD002 | 5530 | fGsmUsfGmUfCmCfAfCfUmGfG | 5531 | mUsfCsmGfAmGfGmCfCmCfCm |
| 20 | | mGfGmCfCmUfCmGfAsmUsmU | | AmGmUfGmGfAmCfAmCsmUs |
| | | | | mU |
| ETD002 | 5532 | fGsmAsfUmAfCmAfUfCfCmUfA | 5533 | mUsfUsmUfGmAfAmGfAmUfA |
| 21 | | mUfCmUfUmCfAmAfAsmUsmU | | mGmGmAfUmGfUmAfUmCsmU |
| | | | | smU |
| ETD002 | 5534 | fAsmUsfUmCfCmCfCfAfCmCfU | 5535 | mUsfGsmUfAmUfCmGfCmAfG |
| 22 | | mGfCmGfAmUfAmCfAsmUsmU | | mGmUmGfGmGfGmAfAmUsmU |
| | | | | smU |
| ETD002 | 5536 | fUsmUsfCmCfCmCfAfCfCmUfG | 5537 | mUsfUsmGfUmAfUmCfGmCfA |
| 23 | | mCfGmAfUmAfCmAfAsmUsmU | | mGmGmUfGmGfGmGfAmAsmU |
| | | | | smU |
| ETD002 | 5538 | fUsmUsfUmCfGmAfCfCfAmGfA | 5539 | mUsfCsmUfCmAfUmUfAmUfC |
| 24 | | mUfAmAfUmGfAmGfAsmUsmU | | mUmGmGfUmCfGmAfAmAsmU |
| | | | | smU |
| ETD002 | 5540 | fUsmCsfGmAfCmCfAfGfAmUfA | 5541 | mUsfUsmGfCmUfCmAfUmUfA |
| 25 | | mAfUmGfAmGfCmAfAsmUsmU | | mUmCmUfGmGfUmCfGmAsmU |
| | | | | smU |
| ETD002 | 5542 | fCsmUsfGmCfUmCfAfAfGmCfA | 5543 | mUsfUsmCfCmAfGmCfUmUfG |
| 26 | | mAfGmCfUmGfGmAfAsmUsmU | | mCmUmUfGmAfGmCfAmGsmU |
| | | | | smU |
| ETD002 | 5544 | fAsmCsfUmGfAmAfAfUfCmGfG | 5545 | mUsfUsmUfGmCfAmGfCmCfCm |
| 27 | | mGfCmUfGmCfAmAfAsmUsmU | | GmAmUfUmUfCmAfGmUsmUs |
| | | | | mU |
| ETD002 | 5546 | fUsmGsfAmAfAmUfCfGfGmGfC | 5547 | mUsfCsmCfUmUfGmCfAmGfCm |
| 28 | | mUfGmCfAmAfGmGfAsmUsmU | | CmCmGfAmUfUmUfCmAsmUs |
| | | | | mU |
| ETD002 | 5548 | fAsmAsfUmCfGmGfGfCfUmGfC | 5549 | mUsfGsmCfCmCfCmUfUmGfCm |
| 29 | | mAfAmGfGmGfGmCfAsmUsmU | | AmGmCfCmCfGmAfUmUsmUs |
| | | | | mU |
| ETD002 | 5550 | fAsmUsfGmGfCmGfAfCfAmCfU | 5551 | mUsfGsmUfUmGfGmGfCmAfG |
| 30 | | mGfCmCfCmAfAmCfAsmUsmU | | mUmGmUfCmGfCmCfAmUsmU |
| | | | | smU |
| ETD002 | 5552 | fUsmGsfGmCfGmAfCfAfCmUfG | 5553 | mUsfAsmGfUmUfGmGfGmCfA |
| 31 | | mCfCmCfAmAfCmUfAsmUsmU | | mGmUmGfUmCfGmCfCmAsmU |
| | | | | smU |
| ETD002 | 5554 | fAsmUsfCmCfGmGfAfAfUmGfC | 5555 | mUsfCsmAfGmCfUmUfUmGfC |
| 32 | | mAfAmAfGmCfUmGfAsmUsmU | | mAmUmUfCmCfGmGfAmUsmU |
| | | | | smU |
| ETD002 | 5556 | fCsmCsfCmAfAmGfUfCfCmCfA | 5557 | mUsfAsmAfGmAfGmGfGmUfG |
| 33 | | mCfCmCfUmCfUmUfAsmUsmU | | mGmGmAfCmUfUmGfGmGsmU |
| | | | | smU |
| ETD002 | 5558 | mUsmGsmGmUfGmUfCfGfAmG | 5559 | mUsfAsmGmUmGfAmUmCmUm |
| 34 | | mAmGmAmUmCmAmCmUmAs | | CmUmCmGfAmCfAmCmCmAs |
| | | mUsmU | | mUsmU |
| ETD002 | 5560 | mUsmCsmGmAfGmAfGfAfUmC | 5561 | mUsfAsmUmUmUfCmAmGmUm |
| 35 | | mAmCmUmGmAmAmAmUmAs | | GmAmUmCfUmCfUmCmGmAs |
| | | mUsmU | | mUsmU |
| ETD002 | 5562 | mCsmAsmGmGfUmUfUfGfCmC | 5563 | mUsfGsmAmCmAfAmAmGmUm |
| 36 | | mAmCmUmUmUmGmUmCmAs | | GmGmCmAfAmAfCmCmUmGs |
| | | mUsmU | | mUsmU |
| ETD002 | 5564 | mGsmCsmAmCfCmUfUfUfUmC | 5565 | mUsfGsmAmGmAfCmCmAmUm |
| 37 | | mAmUmGmGmUmCmUmCmAs | | GmAmAmAfAmGfGmUmGmCs |
| | | mUsmU | | mUsmU |
| ETD002 | 5566 | mAsmGsmCmUfGmGfAfGfCmC | 5567 | mUsfGsmUmUmAfGmGmAmA |
| 38 | | mUmUmCmCmUmAmAmCmAs | | mGmGmCmUfCmCfAmGmCmU |
| | | mUsmU | | smUsmU |

### Example 6. Screening ALOX15 siRNAs for Activity in Cells in Culture

[0537] The chemically modified ALOX15 siRNAs derived from sequences in Screening Subset A, human/mouse subset (Subset B) and human/rabbit subset (Subsest C) were assayed for ALOX15 mRNA knockdown activity in cells in culture. MCF7 (ATCC® HTB-22™) cells were seeded in 96-well tissue culture plates at a cell density of 10,000 cells per well in DMEM supplemented with 10% fetal bovine serum and incubated overnight in a water-jacketed, humidified incubator at 37° C. in an atmosphere composed of air plus 5% carbon dioxide. The ALOX15 siRNAs were individually transfected into MCF7 cells in duplicate wells at 10 nM final concentration using 0.3 μL Lipofectamine RNAiMax (Fisher) per well. Silencer Select Negative Control #1 (ThermoFisher, Catalog #4390843) and Silencer Select ALOX15 siRNA s1289 (ThermoFisher, Catalog #4392420) were transfected at 10 nM final concentration as controls. After incubation for 48 hours at 37° C., total RNA was harvested from each well and cDNA prepared using TaqMan® Fast Advanced Cells-to-CT™ Kit (ThermoFisher, Catalog #A35374) according to the manufacturer's instructions. The level of ALOX15 mRNA from each well was measured in triplicate by real-time qPCR on an Applied Biosystems 7500 Fast Real-Time PCR machine using TaqMan Gene Expression Assay for human ALOX15 (ThermoFisher, assay #Hs00993765_g1). The level of PPIA mRNA was measured using TaqMan Gene Expression Assay (ThermoFisher, assay #Hs99999904_m1) and used to determine relative ALOX15 mRNA levels in each well using the delta-delta Ct method. All data were normalized to relative ALOX15 mRNA levels in untreated MCF7 cells. Results are shown in Table 6.

TABLE 6
Activity of ALOX15 siRNAs from Screening Set
A, the Human/Mouse Subset and the Human/Rabbit
Subset Transfected in MCF7 Cells at 10 nM

| siRNA (10 nM) | Relative ALOX15 mRNA Level |
|---|---|
| — | 1.000 |
| Negative Control | 0.927 |
| siRNA | |
| siALOX15 | 0.176 |
| ETD00138 | 0.918 |
| ETD00139 | 0.566 |
| ETD00140 | 0.654 |
| ETD00141 | 0.747 |
| ETD00142 | 0.704 |
| ETD00143 | 0.745 |
| ETD00144 | 0.868 |
| ETD00145 | 0.689 |
| ETD00146 | 0.674 |
| ETD00147 | 0.666 |
| ETD00148 | 0.589 |
| ETD00149 | 0.731 |
| ETD00150 | 0.662 |
| ETD00151 | 0.642 |
| ETD00152 | 0.674 |
| ETD00153 | 0.801 |
| ETD00154 | 0.634 |
| ETD00155 | 0.213 |
| ETD00156 | 0.243 |
| ETD00157 | 0.348 |
| ETD00158 | 0.325 |
| ETD00159 | 0.296 |
| ETD00160 | 0.354 |
| ETD00161 | 0.249 |
| ETD00162 | 0.556 |
| ETD00163 | 0.447 |
| ETD00164 | 0.615 |
| ETD00165 | 0.724 |
| ETD00166 | 0.739 |
| ETD00167 | 0.694 |
| ETD00168 | 0.722 |
| ETD00169 | 0.149 |
| ETD00170 | 0.233 |
| ETD00171 | 0.342 |
| ETD00172 | 0.184 |
| ETD00173 | 0.227 |
| ETD00174 | 0.231 |
| ETD00175 | 0.211 |
| ETD00176 | 0.117 |
| ETD00177 | 0.179 |
| ETD00178 | 0.223 |
| ETD00179 | 0.569 |
| ETD00180 | 0.275 |
| ETD00181 | 0.372 |
| ETD00182 | 0.279 |
| ETD00183 | 0.194 |
| ETD00184 | 0.414 |
| ETD00185 | 0.262 |
| ETD00186 | 0.416 |
| ETD00187 | 0.362 |
| ETD00188 | 0.512 |
| ETD00189 | 0.584 |
| ETD00190 | 0.315 |
| ETD00191 | 0.868 |
| ETD00192 | 0.674 |
| ETD00193 | 0.223 |
| ETD00194 | 0.695 |
| ETD00195 | 0.359 |
| ETD00196 | 0.716 |
| ETD00197 | 0.691 |
| ETD00198 | 0.339 |
| ETD00199 | 0.430 |
| ETD00200 | 0.510 |
| ETD00201 | 0.195 |
| ETD00202 | 0.498 |
| ETD00203 | 0.470 |
| ETD00204 | 0.217 |
| ETD00205 | 0.394 |
| ETD00206 | 0.231 |
| ETD00207 | 0.201 |
| ETD00208 | 0.413 |
| ETD00209 | 0.185 |
| ETD00210 | 0.131 |
| ETD00211 | 0.152 |
| ETD00212 | 0.182 |
| ETD00213 | 0.228 |
| ETD00214 | 0.187 |
| ETD00215 | 0.723 |
| ETD00216 | 0.410 |
| ETD00217 | 0.229 |
| ETD00218 | 0.490 |
| ETD00219 | 0.359 |
| ETD00220 | 0.637 |
| ETD00221 | 0.223 |
| ETD00222 | 0.373 |
| ETD00223 | 0.254 |
| ETD00224 | 0.188 |
| ETD00225 | 0.268 |
| ETD00226 | 0.478 |
| ETD00227 | 0.408 |
| ETD00228 | 0.612 |
| ETD00229 | 0.537 |
| ETD00230 | 0.217 |
| ETD00231 | 0.217 |
| ETD00232 | 0.220 |
| ETD00233 | 0.355 |

“—”, untreated MCF7 cells;
Negative Control siRNA, Silencer Select Negative Control #1;
siALOX15, Silencer Select ALOX15 siRNA s1289

[0538] The 42 siRNAs showing the greatest degree of knockdown of ALOX15 siRNA at 10 nM were tested in a second screen for activity at 1 nM concentration using MCF7 cells and the transfection procedures as described above. Results are shown in Table 7.

TABLE 7
Activity of 42 ALOX15 siRNAs from Screening Set
A, the Human/Mouse Subset and the Human/Rabbit
Subset Transfected in MCF7 Cells at 1 nM

| siRNA (1 nM) | Relative ALOX15 mRNA Level |
|---|---|
| — | 1.000 |
| Negative Control | 0.980 |
| siRNA | |
| siALOX15 | 0.352 |
| ETD00155 | 0.507 |
| ETD00156 | 0.586 |
| ETD00158 | 0.533 |
| ETD00159 | 0.552 |
| ETD00161 | 0.309 |
| ETD00169 | 0.236 |
| ETD00170 | 0.320 |
| ETD00171 | 0.397 |
| ETD00172 | 0.216 |
| ETD00173 | 0.270 |
| ETD00174 | 0.337 |
| ETD00175 | 0.316 |
| ETD00176 | 0.134 |
| ETD00177 | 0.201 |
| ETD00178 | 0.287 |
| ETD00180 | 0.418 |
| ETD00182 | 0.387 |
| ETD00183 | 0.246 |
| ETD00184 | 0.423 |
| ETD00185 | 0.199 |
| ETD00190 | 0.423 |
| ETD00193 | 0.218 |
| ETD00195 | 0.231 |
| ETD00198 | 0.397 |
| ETD00201 | 0.263 |
| ETD00204 | 0.217 |
| ETD00206 | 0.496 |
| ETD00207 | 0.542 |
| ETD00209 | 0.291 |
| ETD00210 | 0.225 |
| ETD00211 | 0.222 |
| ETD00212 | 0.340 |
| ETD00213 | 0.365 |
| ETD00214 | 0.315 |
| ETD00217 | 0.346 |
| ETD00221 | 0.198 |
| ETD00223 | 0.623 |
| ETD00224 | 0.499 |
| ETD00225 | 0.316 |
| ETD00230 | 0.371 |
| ETD00231 | 0.372 |
| ETD00232 | 0.307 |
| ETD00214 | 0.315 |
| ETD00217 | 0.346 |
| ETD00221 | 0.198 |
| ETD00223 | 0.623 |
| ETD00224 | 0.499 |
| ETD00225 | 0.316 |
| ETD00230 | 0.371 |
| ETD00231 | 0.372 |
| ETD00232 | 0.307 |

“—”, untreated MCF7 cells;
Negative Control siRNA, Silencer Select Negative Control #1;
siALOX15, Silencer Select ALOX15 siRNA s1289

### Example 7. Determining the IC50 of ALOX15 siRNAs

[0539] The IC50 values for knockdown of ALOX15 mRNA by select ALOX15 siRNAs were determined in MCF7 cells. The ETD00183, ETD00185, ETD00193, ETD00210 and ETD00217 siRNAs were assayed individually at 3 nM, 1 nM, 0.3 nM, 0.1 nM and 0.03 nM. MCF7 (ATCC® HTB-22™) cells were seeded in 96-well tissue culture plates at a cell density of 10,000 cells per well in DMEM supplemented with 10% fetal bovine serum and incubated overnight in a water-jacketed, humidified incubator at 37° C. in an atmosphere composed of air plus 5% carbon dioxide. The ALOX15 siRNAs were individually transfected into MCF7 cells in triplicate wells using 0.3 μL Lipofectamine RNAiMax (Fisher) per well. Silencer Select Negative Control #1 (ThermoFisher, Catalog #4390843) was transfected at 3 nM final concentration as controls. After incubation for 48 hours at 37° C., total RNA was harvested from each well and cDNA prepared using TaqMan® Fast Advanced Cells-to-CT™ Kit (ThermoFisher, Catalog #A35374) according to the manufacturer's instructions. The level of ALOX15 mRNA from each well was measured in triplicate by real-time qPCR on an Applied Biosystems 7500 Fast Real-Time PCR machine using TaqMan Gene Expression Assay for human ALOX15 (ThermoFisher, assay #Hs00993765_g1). The level of PPIA mRNA was measured using TaqMan Gene Expression Assay (ThermoFisher, assay #Hs99999904_m1) and used to determine relative ALOX15 mRNA levels in each well using the delta-delta Ct method. All data were normalized to relative ALOX15 mRNA levels in untreated MCF7 cells. Curve fit was accomplish using the [inhibitor] vs. response (three parameters) function in GraphPad Prism software. Results are shown in Table 8.

TABLE 8
IC50 Values of ALOX15 siRNAs

| | | | Relative ALOX15 | | R |
|---|---|---|---|---|---|
| siRNA | [siRNA] | | mRNA Levels | IC50 | squared |
| — | — | | 1.000 | ND | ND |
| Negative | 3 | nM | 1.283 | ND | ND |
| Control | | | | | |
| siRNA | | | | | |
| ETD00183 | 3 | nM | 0.214 | 0.044 | 0.958 |
| | 1 | nM | 0.312 | | |
| | 0.3 | nM | 0.293 | | |
| | 0.1 | nM | 0.435 | | |
| | 0.03 | nM | 0.610 | | |
| ETD00185 | 3 | nM | 0.138 | 0.029 | 0.954 |
| | 1 | nM | 0.211 | | |
| | 0.3 | nM | 0.200 | | |
| | 0.1 | nM | 0.276 | | |
| | 0.03 | nM | 0.417 | | |
| ETD00193 | 3 | nM | 0.240 | 0.094 | 0.993 |
| | 1 | nM | 0.265 | | |
| | 0.3 | nM | 0.333 | | |
| | 0.1 | nM | 0.397 | | |
| | 0.03 | nM | 0.510 | | |
| ETD00210 | 3 | nM | 0.189 | 0.082 | 0.995 |
| | 1 | nM | 0.271 | | |
| | 0.3 | nM | 0.394 | | |
| | 0.1 | nM | 0.573 | | |
| | 0.03 | nM | 0.849 | | |
| ETD00217 | 3 | nM | 0.302 | 0.158 | 0.989 |
| | 1 | nM | 0.415 | | |
| | 0.3 | nM | 0.505 | | |
| | 0.1 | nM | 0.742 | | |
| | 0.03 | nM | 0.887 | | |

“—”, untreated MCF7 cells;
Negative Control siRNA, Silencer Select Negative Control #1;
ND, not determined

### Example 8. Determining the IC50 of ALOX15 siRNAs with Alternative 2′ Modification Patterns

[0540] The IC50 values for knockdown of ALOX15 mRNA by ALOX15 siRNAs with alternative 2′ modification patterns were determined in MCF7 cells. The ETD00234, ETD00235, ETD00236, ETD00237 and ETD00238 siRNAs were assayed individually at 3 nM, 1 nM, 0.3 nM, 0.1 nM and 0.03 nM. MCF7 (ATCC® HTB-22™) cells were seeded in 96-well tissue culture plates at a cell density of 10,000 cells per well in DMEM supplemented with 10% fetal bovine serum and incubated overnight in a water-jacketed, humidified incubator at 37° C. in an atmosphere composed of air plus 500 carbon dioxide. The ALOX15 siRNAs were individually transfected into MCF7 cells in triplicate wells using 0.3 μL Lipofectamine RNAiMax (Fisher) per well. Silencer Select Negative Control #1 (ThermoFisher, Catalog #4390843) was transfected at 3 nM final concentration as controls. After incubation for 48 hours at 37° C., total RNA was harvested from each well and cDNA prepared using TaqMan® Fast Advanced Cells-to-CT™ Kit (ThermoFisher, Catalog #A35374) according to the manufacturer's instructions. The level of ALOX15 mRNA from each well was measured in triplicate by real-time qPCR on an Applied Biosystems 7500 Fast Real-Time PCR machine using TaqMan Gene Expression Assay for human ALOX15 (ThermoFisher, assay #Hs00993765_g1). The level of PPIA mRNA was measured using TaqMan Gene Expression Assay (ThermoFisher, assay #Hs99999904_m1) and used to determine relative ALOX15 mRNA levels in each well using the delta-delta Ct method. All data were normalized to relative ALOX15 mRNA levels in untreated MCF7 cells. Curve fit was accomplish using the [inhibitor] vs. response (three parameters) function in GraphPad Prism software. Results are shown in Table 9.

TABLE 9
IC50 Values of ALOX15 siRNAs with Alternative
2′ Modification Patterns

| | | | Relative ALOX15 | | R |
|---|---|---|---|---|---|
| siRNA | [siRNA] | | mRNA Levels | IC50 | squared |
| — | — | | 1.000 | ND | ND |
| Negative | 3 | nM | 1.150 | ND | ND |
| Control | | | | | |
| siRNA | | | | | |
| siALOX15 | 3 | nM | 0.461 | ND | ND |
| ETD00234 | 0.03 | nM | 0.753 | 0.653 | 0.954 |
| | 0.1 | nM | 0.714 | | |
| | 0.3 | nM | 0.666 | | |
| | 1 | nM | 0.396 | | |
| | 3 | nM | 0.353 | | |
| ETD00235 | 0.03 | nM | 0.544 | 1.342 | 0.239 |
| | 0.1 | nM | 0.357 | | |
| | 0.3 | nM | 0.522 | | |
| | 1 | nM | 0.400 | | |
| | 3 | nM | 0.383 | | |
| ETD00236 | 0.03 | nM | 0.537 | 0.100 | 0.967 |
| | 0.1 | nM | 0.485 | | |
| | 0.3 | nM | 0.372 | | |
| | 1 | nM | 0.360 | | |
| | 3 | nM | 0.336 | | |
| ETD00238 | 0.03 | nM | 0.958 | 0.447 | 0.959 |
| | 0.1 | nM | 0.796 | | |
| | 0.3 | nM | 0.729 | | |
| | 1 | nM | 0.599 | | |
| | 3 | nM | 0.437 | | |

### Example 9. Assessing the Extent of Nuclease Resistance of ALOX15 siRNAs

[0541] Resistance of select ALOX15 siRNAs to nuclease digestion was assessed by incubating the siRNAs in rat liver tritosomes. Each siRNA (7 ng/μL final concentration) was placed into a PCR tube containing a cocktail prepared on ice containing 1× catabolic buffer (Xenotech, Catalog #K5200, Lot #18-1-0698), 0.5× rat tritosomes (Xenotech, Catalog #R0610.LT, Lot #1610405), 0.1 U/μL porcine intestinal heparin (Zageno, Catalog #H3149-10KU). An aliquot was removed, an equal volume of 50 mM EDTA was added, and the sample placed at −80° C. This sample was designated as the 0 hr timepoint. The remainder of the reaction was placed in an Eppendorf Mastercycler Gradient and incubated at 37° C. After incubation for 4 and 24 hours, an aliquot was removed from the reaction and stopped by addition of an equal volume of 50 mM EDTA and placed at −80° C. until analysis by gel electrophoresis. All samples were then thawed on ice and 6×DNA Gel Loading Dye (ThermoFisher Catalog #R0611) was added to 1× final concentration. 20 μL of each sample was loaded onto a 20% polyacrylamide TBE gel (ThermoFisher, Catalog #EC63155BOX). Electrophoresis was carried out at a constant 100V for 75 minutes in an XCell SureLock Mini-Cell Electrophoresis System (ThermoFisher) using 1×TBE (Tris/boric/EDTA) (Fisher, Catalog #FERB52) as the tank buffer. The siRNA was visualized by staining the gel with a 1:10,000 dilution of SYBR Gold (ThermoFisher, Catalog #S-11494) in TBE for 15 minutes at room temperature with rocking. The gel was washed with 1×TBE for 15 minutes and then placed on a FotoPrep1 UV transilluminator (Fotodyne). The gel was imaged using the camera app set on MONO on an iPhone 6s with a yellow gel filter (Neewer) placed over the lens. Band intensity was measured using NIH ImageJ using the “Analyze: Gels” function. The remaining siRNA percent was normalized to the value obtained at the 0 hr timepoint for that siRNA. Results are shown in Table 10. By using this assay, we were able to determine that some siRNAs are more resistant to nuclease digestion with more remaining intact over time compared with other siRNAs with the same modification pattern.

TABLE 10
Resistance of ALOX15 siRNAs to Nucleases
Present in Rat Liver Tritosomes

| siRNA | Timepoint (hr) | % remaining |
|---|---|---|
| ETD00169 | 0 | 100% |
| | 4 | 65% |
| | 24 | 36% |
| ETD00172 | 0 | 100% |
| | 4 | 73% |
| | 24 | 74% |
| ETD00176 | 0 | 100% |
| | 4 | 50% |
| | 24 | 17% |
| ETD00177 | 0 | 100% |
| | 4 | 60% |
| | 24 | 41% |
| ETD00183 | 0 | 100% |
| | 4 | 83% |
| | 24 | 70% |
| ETD00185 | 0 | 100% |
| | 4 | 80% |
| | 24 | 68% |
| ETD00193 | 0 | 100% |
| | 4 | 81% |
| | 24 | 61% |
| ETD00210 | 0 | 100% |
| | 4 | 77% |
| | 24 | 56% |
| ETD00211 | 0 | 100% |
| | 4 | 85% |
| | 24 | 66% |
| ETD00217 | 0 | 100% |
| | 4 | 67% |
| | 24 | 19% |
| ETD00234 | 0 | 1.00 |
| | 4 | 1.18 |
| | 24 | 0.74 |
| ETD00235 | 0 | 1.00 |
| | 4 | 1.10 |
| | 24 | 0.69 |
| ETD00236 | 0 | 1.00 |
| | 4 | 1.26 |
| | 24 | 0.45 |
| ETD00237 | 0 | 1.00 |
| | 4 | 0.79 |
| | 24 | 0.40 |
| ETD00238 | 0 | 1.00 |
| | 4 | 0.81 |
| | 24 | 0.29 |

### Example 10. Inhibition of ALOX15 in a Mouse Model for Nasal Polyps Using Modified ALOX15 siRNAs

[0542] In this experiment, a murine model of nasal polyps is used to evaluate the effect of siRNA inhibition of ALOX15. In the murine model, chronic rhinitis is induced with ovalbumin (OVA) treatment, followed by treatment with a combination of ovalbumin and Staphylococcus aureus enterotoxin B (SEB) leading to nasal polyps formation.

[0543] Briefly, mice are divided into three groups: Group 1—a nasal polyp group treated with non-targeting control siRNA composed of annealed sense strand SEQ ID NO: 5358 and antisense strands SEQ ID NO: 5359, Group 2—a nasal polyp group treated with ALOX15 siRNA ETD00217 (SEQ ID NOS: 5524 and 5525), Group 3—a nasal polyp group treated with ALOX15 siRNA ETD00238 (SEQ ID NOS: 5566 and 5567) with five mice in each group. 4-week-old female BALB/c mice are sensitized with an intraperitoneal injection of 25 ug of OVA on days 0 and 7. From day 14 to day 20 mice are nasally challenged daily with 6% OVA. From day 20, 6% OVA+Staphylococcus aureus enterotoxin B (10 ng) is instilled into the nasal cavity of the mice three times per week for 8 weeks.

[0544] At weeks 0 and 4 of OVA+SEB, siRNA is applied. Anesthesia for administration of siRNA is achieved with intraperitoneal injection of 0.2 ml nembutal (5 mg/ml). Naked siRNA is resuspended in Opti-MEM, and 10 ug siRNA in 5 μL volume is delivered to each nostril with a micropipette. At the end of eight weeks of OVA+SEB and siRNA treatment, mice are sacrificed by cervical dislocation following injection of 0.3 ml nembutal. Nasal cavity samples are prepared using a large scalpel to remove the snout with a transverse cut behind the back molars. The external nares are flushed with PBS to wash out any blood within the nasal cavity. Histologic quantification of the number of nasal polyps and the amount of eosinophil infiltration is performed using hematoxylin and eosin (H&E) staining of the nasal cavity. The number of polyps and amount of eosinophilic infiltration are compared in the non-targeting siRNA Group 1 and the ALOX15 siRNA Groups 2 and 3. Additionally, nasal mucosa is removed using a small curette after bisecting the nasal tissue sagitally along the nasal septum. Cell lysates are prepared using a RIPA buffer, and these lysates are used to measure arachidonic acid metabolites of ALOX15 including prostaglandin E2, cysteinyl leukotrienes (LTC4, D4, and E4), and 15(S)-HETE. The metabolites are quantified by ELISA (Cayman Chemical) according to manufacturer's recommended protocol. Metabolite levels are compared between non-targeting siRNA Group 1 and the ALOX15 siRNA Groups 2 and 3.

### Example 11. siRNA Inhibition of ALOX15 in a Mouse Model for Nasal Polyps

[0545] In this experiment, a murine model of nasal polyps is used to evaluate the effect of siRNA inhibition of ALOX15. In the murine model, chronic rhinitis is induced with ovalbumin (OVA) treatment, followed by treatment with a combination of ovalbumin and Staphylococcus aureus enterotoxin B (SEB) leading to nasal polyps formation.

[0546] Briefly, mice are divided into two groups: a nasal polyp+scrambled siRNA group (NP+siRNA scrambled) and a nasal polyp group+ALOX15 siRNA group (NP+siRNA ALOX15), with five mice in each group. 4-week-old female BALB/c mice are sensitized with an intraperitoneal injection of 25 μg of OVA on days 0 and 7. From day 14 to day 20 mice are nasally challenged daily with 6% OVA. From day 20, 6% OVA+Staphylococcus aureus enterotoxin B (10 ng) is instilled into the nasal cavity of the mice three times per week for 8 weeks.

[0547] At weeks 0 and 4 of OVA+SEB, siRNA is applied. Anesthesia for administration of siRNA is achieved with intraperitoneal injection of 0.2 ml nembutal (5 mg/ml). The ALOX15 targeting siRNA is cross-reactive with the mouse and human ALOX15 mRNA and consists of a double stranded RNA oligonucleotide with sense and antisense sequences as follows: 5′ mGsmCmUmGfUmGmCmUfGmAmAmGfAmAmGmUfUfCmAsdTsdT 3′ (SEQ ID NO: 5354, or SEQ ID NO: 3765 with 2′ modifications and having the last two residues replaced by two T residues) and 5′ mUsfGmAmAmCfUfUmCmUfUfCfAmGfCmAmCmAfGmCsdTsdT 3′ (SEQ ID NO: 5355, or SEQ ID NO: 3766 with 2′ modifications and having the last two residues replaced by two T residues). This siRNA targets nucleotide positions 1890-1908 of the murine ALOX15 mRNA (GenBank Acc. #NM_009660.3) (full-length murine mRNA set forth as SEQ ID NO: 5356) and positions 1883-2001 of the human ALOX15 mRNA (GenBank Acc. #NM_001140.4) (full-length human mRNA set forth as SEQ ID NO: 5357). The non-targeting control siRNA consists of the following sense and antisense sequences: 5′ mGsmUmCmCfAmUmCmAmfGmCmUmCmfGmGmUmUfAfGmAsdTsdT 3′ (SEQ ID NO: 5358) and 5′ mUsfCmUmAmAfCfCmGmAfGfCfUmGfAmUmGmGfAmCdTdT 3′ (SEQ ID NO: 5359). The letter “m” before a nucleotide indicates a 2′O-methyl substitution, the letter “f” indicates a 2′flouro substitution, the letter “d” indicates a deoxyribonucleotide substitution, and the letter “s” indicates a phosphorothioate linkage.

[0548] Naked siRNA is resuspended in Opti-MEM, and 10 ug siRNA in 5 ul volume is delivered to each nostril with a micropipette. At the end of eight weeks of OVA+SEB and siRNA treatment, mice are sacrificed by cervical dislocation following injection of 0.3 ml nembutal. Nasal cavity samples are prepared using a large scalpel to remove the snout with a transverse cut behind the back molars. The external nares are flushed with PBS to wash out any blood within the nasal cavity. Histologic quantification of the number of nasal polyps and the amount of eosinophil infiltration is performed using hematoxylin and eosin (H&E) staining of the nasal cavity. The number of polyps and amount of eosinophilic infiltration are compared in the NP+siRNA non-targeting group and the NP+siRNA ALOX15 group. Additionally, nasal mucosa is removed using a small curette after bisecting the nasal tissue sagitally along the nasal septum. Cell lysates are prepared using a RIPA buffer, and these lysates are used to measure arachidonic acid metabolites of ALOX15 including prostaglandin E2, cysteinyl leukotrienes (LTC4, D4, and E4), and 15(S)-HETE. The metabolites are quantified by ELISA (Cayman Chemical) according to manufacturer's recommended protocol. Metabolite levels are compared between the NP+siRNA non-targeting group and the NP+siRNA ALOX15 group.

### Example 12. Inhibition of ALOX15 in Human Cells Using Modified ALOX15 siRNAs

[0549] In this experiment siRNA inhibition of ALOX15 is performed in primary human nasal epithelial cells (pHNEC) and a human eosinophil cell line (EoL-1), to evaluate the effect on arachidonic acid metabolite production under conditions of no treatment versus IL13 treatment. IL13 treatment serves to induce ALOX15 expression, and is a critical regulator of the Th2 inflammation present in human nasal polyposis patients.

[0550] EoL-1 cells are initially cultured in the presence of dbcAMP (100 uM) for 7 days to differentiate to a mature eosinophil cell type. Next, differentiated EoL-1 cells and pHNECs are transfected in a 24-well plate with a non-targeting siRNA composed of annealed sense strand SEQ ID NO: 5358 and antisense strands SEQ ID NO: 5359 or ALOX15 targeting siRNAs ETD00183, ETD00185, ETD00193, ETD00210, ETD00217, ETD00234, ETD00235, ETD00236, ETD00237 and ETD00238 (see Table 5B for siRNA sequences), immediately followed by +/− supplementation with IL13 (20 ng/ml). Additionally, all wells are supplemented with 3 μM arachidonic acid so that substrate is a not a limiting factor in metabolite production.

[0551] Briefly, transfections are performed using TransIT TKO (Mirus) following the manufacturer's recommended protocol. For each well, 1.4 μL siRNA (10 uM stock), 2.5 μL TransIT-TKO, and 50 μL OptiMEM are mixed, incubated at room temperature for 30 minutes, and added dropwise to each well. At 72 hrs post-transfection, supernatant is collected, cells are trypsinized, and cell lysates prepared using a RIPA buffer. Supernatants are used to measure arachidonic acid metabolites of ALOX15 including prostaglandin E2, cysteinyl leukotrienes (LTC4, D4, and E4), and 15(S)-HETE. The metabolites are quantified by ELISA (Cayman Chemical) according to manufacturer's recommended protocol. Cell lysates are used to perform Western blots, using an ALOX15 antibody (Abcam) and a GAPDH antibody (Abcam) as a loading control. Comparison made between the groups treated with ALOX15 targeting siRNAs, untreated cells, and cells treated with a non-targeting control siRNA.

### Example 13. siRNA Inhibition of ALOX15 in Human Cells

[0552] In this experiment siRNA inhibition of ALOX15 is performed in primary human nasal epithelial cells (pHNEC) and a human eosinophil cell line (EoL-1), to evaluate the effect on arachidonic acid metabolite production under conditions of no treatment versus IL13 treatment. IL13 treatment serves to induce ALOX15 expression, and is a critical regulator of the Th2 inflammation present in human nasal polyposis patients.

[0553] EoL-1 cells are initially cultured in the presence of dbcAMP (100 uM) for 7 days to differentiate to a mature eosinophil cell type. Next, differentiated EoL-1 cells and pHNECs are transfected in a 24-well plate with a non-targeting or ALOX15 targeting siRNA immediately followed by +/− supplementation with IL13 (20 ng/ml). Additionally, all wells are supplemented with 10 uM arachidonic acid so that substrate is a not a limiting factor in metabolite production. The ALOX15 targeting siRNA consisted of a double stranded RNA oligonucleotide with sense and antisense sequences as follows: 5′ GCUGUGCUGAAGAAGUUCAdTdT 3′ (SEQ ID NO: 5360, or SEQ ID NO: 3765 having the last two residues replaced by two T residues) and 5′ UGAACUUCUUCAGCACAGCdTdT 3′ (SEQ ID NO: 5361, or SEQ ID NO: 3766 having the last two residues replaced by two T residues). This siRNA targets nucleotide positions 1883-2001 of the human ALOX15 mRNA (GenBank Acc. #NM_001140.4). The non-targeting control siRNA consists of the following sense and antisense sequences: 5′ GUCCAUCAGCUCGGUUAGAdTdT 3′ (SEQ ID NO: 5362) and 5′ UCUAACCGAGCUGAUGGACdTdT 3′ (SEQ ID NO: 5363). The letter “d” indicates a deoxyribonucleotide substitution. Briefly, transfections are performed using TransIT TKO (Mirus) following the manufacturer's recommended protocol. For each well, 1.4 μL siRNA (10 μM stock), 2.5 μL TransIT-TKO, and 50 μL OptiMEM are mixed, incubated at room temperature for 30 minutes, and added dropwise to each well. At 72 hrs post-transfection, supernatant is collected, cells are trypsinized, and cell lysates prepared using a RIPA buffer. Supernatants are used to measure arachidonic acid metabolites of ALOX15 including prostaglandin E2, cysteinyl leukotrienes (LTC4, D4, and E4), and 15(S)-HETE. The metabolites are quantified by ELISA (Cayman Chemical) according to manufacturer's recommended protocol. Cell lysates are used to perform Western blots, using an ALOX15 antibody (Abcam) and a GAPDH antibody (Abcam) as a loading control. Comparison made between the groups treated with ALOX15 targeting siRNA, untreated cells, and cells treated with a non-targeting control siRNA.

### Example 14. Inhibition of ALOX15 in a Rabbit Model for Nasal Polyps Using Modified ALOX15 siRNAs

[0554] In this experiment, a rabbit model of nasal polyps is used to evaluate the effect of siRNA inhibition of ALOX15. In the rabbit model eosinophilic nasal polyps are induced by eliciting an allergic reaction in animals with ovalbumin (OVA) and poly-L-arginine treatment. This model has characteristics of the human disease.

[0555] Male New Zealand white rabbits are obtained from Charles River Laboratories. The animals are kept in environmentally controlled rooms under specific pathogen-free conditions (temperature, 20-26° C.; humidity, 30-70%) with a 12-hour light-dark cycle for 2 weeks before use. Food and water are available ad libitum. All animals are used in accordance with animal care guidelines.

[0556] Maxillary sinusitis is induced in age-matched (13-week-old) rabbits divided into four groups. Group A (n=4) is a control group in which rabbits are treated with neither reagent nor surgery. For groups B-D (n=6 for each), rabbits are sensitized by subcutaneous injection with 1 mL of saline containing 2.5% OVA plus 0.4% alum on days 0 and 7. On day 14, under anesthesia with i.v. injection of 25 mg/kg of pentobarbital sodium (Nembutal, Dainippon Sumitomo Pharma, Osaka, Japan), nasal dorsa are incised to expose maxillary sinus cavities and both sides of the ostia were occluded with plugs of sterile cotton wool and butylcyanoacrylate tissue glue (Histoacryl; B. Braun, Melsungen AG, Germany) under a microscope. After 2 weeks of wound closure, OVA is administered into both sides of the maxillary sinuses (0.5 mL/sinus of 2.5% OVA in saline, three times a week for 2 weeks). Thereafter, the animals in groups B-D receive 5 mg/mL poly-L-arginine in saline three times a week for 4 weeks.

[0557] After induction of maxillary sinusitis with OVA and poly-L-arginine, the animals receive 0.5 mL/sinus of saline (group B), 2 mg/mL ALOX15 siRNA in saline (group C), or 2 mg/mL control siRNA in saline (group D) three times a week for 4 weeks. One week after the last administration into the maxillary sinus, the rabbits are sacrificed by i.v. injection of pentobarbital sodium and the anterior nasal region with the attached bone, excluding the ocular bulb, is dissected. The mucosal tissues for gene analysis are collected from the right side of the maxillary sinus and stored in RNAlater RNA stabilization reagent (Ambion, Austin, Tex.) at 4° C. until analysis. The left side of the maxillary sinus is used for histopathological analysis. Anesthesia for administration of siRNA is achieved with intraperitoneal injection of 0.2 ml nembutal (5 mg/ml). The ALOX15 targeting siRNA ETD00234 is cross-reactive with the rabbit and human ALOX15 mRNA. The non-targeting control siRNA is composed of annealed sense strand SEQ ID NO: 5358 and antisense strands SEQ ID NO: 5359.

[0558] Antibodies to OVA are measured using enzyme-linked immunosorbent assay (ELISA). Blood samples are collected from the pinna vein on day 13 to measure OVA-specific IgG levels. ELISA is performed according to the protocol of a previous study. The titers of samples are calculated by comparison with internal standard serum, prepared from the rabbits immunized with 2.5% OVA plus 0.4% alum eight times. The value of this standard is arbitrarily calculated as 10,000 U/ml.

[0559] Histopathological analysis of nasal tissue is carried out on tissue fixed with 10% neutral buffered formalin solution for 1 week, decalcified in 0.5 mol/L of ethylenediaminetetraacetic acid at 37° C., embedded in paraffin, and cut into 2-μm-thick sections. After hematoxylin-eosin staining, histopathological analysis is performed by selecting a representative field of mucosa per sinus where the most prominent change is detected with 200× magnification. The number of eosinophils and the area of mucosa in each field are measured to calculate the density of eosinophils (cells/mm2). The width of the lamina propria (μm) is measured as an indirect indication of mucosal hypertrophy. The degree of polyp formation is graded semiquantitatively according to the following score: 0=little or no polyp formation detected; 1=slight (slight prominence of mucosa); 2=moderate (polyp of a size from one-quarter to one-half of the field); 3=severe (polyp of a size more than one-half of the field).

[0560] ALOX15 mRNA knockdown in the mucosal tissues is quantified using real-time polymerase chain reaction. Total RNA is reverse transcribed to cDNA using a Maxima First Strand cDNA Synthesis Kit for RT-qPCR (Invitrogen, Carlsbad, Calif.). Real-time quantitative polymerase chain reaction (PCR) is performed on an Applied Biosystems 7500 Fast Real-Time PCR machine using TaqMan Gene Expression Assay for rabbit ALOX15 (ThermoFisher, assay #Oc03823548_s1). The level of rabbit GAPDH mRNA is measured using TaqMan Gene Expression Assay (ThermoFisher, assay #Oc03823402_g1) and used to determine relative ALOX15 mRNA levels in each rabbit using the delta-delta Ct method.

### Example 15. siRNA Inhibition of ALOX15 in a Rabbit Model for Nasal Polyps

[0561] In this experiment, a rabbit model of nasal polyps is used to evaluate the effect of siRNA inhibition of ALOX15. In the rabbit model eosinophilic nasal polyps are induced by eliciting an allergic reaction in animals with ovalbumin (OVA) and poly-L-arginine treatment. This model has characteristics of the human disease.

[0562] Male New Zealand white rabbits are obtained from Charles River Laboratories. The animals are kept in environmentally controlled rooms under specific pathogen-free conditions (temperature, 20-26° C.; humidity, 30-70%) with a 12-hour light-dark cycle for 2 weeks before use. Food and water are available ad libitum. All animals are used in accordance with animal care guidelines.

[0563] Maxillary sinusitis is induced in age-matched (13-week-old) rabbits divided into four groups. Group A (n=4) is a control group in which rabbits are treated with neither reagent nor surgery. For groups B-D (n=6 for each), rabbits are sensitized by subcutaneous injection with 1 mL of saline containing 2.5% OVA plus 0.4% alum on days 0 and 7. On day 14, under anesthesia with i.v. injection of 25 mg/kg of pentobarbital sodium (Nembutal, Dainippon Sumitomo Pharma, Osaka, Japan), nasal dorsa are incised to expose maxillary sinus cavities and both sides of the ostia were occluded with plugs of sterile cotton wool and butylcyanoacrylate tissue glue (Histoacryl; B. Braun, Melsungen AG, Germany) under a microscope. After 2 weeks of wound closure, OVA is administered into both sides of the maxillary sinuses (0.5 mL/sinus of 2.5% OVA in saline, three times a week for 2 weeks). Thereafter, the animals in groups B-D receive 5 mg/mL poly-L-arginine in saline three times a week for 4 weeks.

[0564] After induction of maxillary sinusitis with OVA and poly-L-arginine, the animals receive 0.5 mL/sinus of saline (group B), 2 mg/mL ALOX15 siRNA in saline (group C), or 2 mg/mL control siRNA in saline (group D) three times a week for 4 weeks. One week after the last administration into the maxillary sinus, the rabbits are sacrificed by i.v. injection of pentobarbital sodium and the anterior nasal region with the attached bone, excluding the ocular bulb, is dissected. The mucosal tissues for gene analysis are collected from the right side of the maxillary sinus and stored in RNAlater RNA stabilization reagent (Ambion, Austin, Tex.) at 4° C. until analysis. The left side of the maxillary sinus is used for histopathological analysis. Anesthesia for administration of siRNA is achieved with intraperitoneal injection of 0.2 ml nembutal (5 mg/ml). The ALOX15 targeting siRNA is cross-reactive with the rabbit and human ALOX15 mRNA and consists of a double stranded RNA oligonucleotide with sense and antisense sequences as follows: 5′ mCsmUmGmUfGmGmAmUfGmAmGmCfGmAmUmUfUfCmUsdTsdT 3′ (SEQ ID NO: 5364, or SEQ ID NO: 1007 having the last two residues replaced by two T residues) and 5′ mAsfGmAmAmAfUfCmGmCfUfCfAmUfCmCmAmCfAmGsdTsdT 3′ (SEQ ID NO: 5365, or SEQ ID NO: 1007 having the last two residues replaced by two T residues). This siRNA targets nucleotide positions 512-530 of the rabbit ALOX15 mRNA (GenBank Acc. #NM_009660.3) and positions 504-522 of the human ALOX15 mRNA (GenBank Acc. #NM_001140.4). The non-targeting control siRNA consists of the following sense and antisense sequences: 5′ mGsmUmCmCfAmUmCmAmfGmCmUmCmfGmGmUmUfAfGmAsdTsdT 3′ (SEQ ID NO: 5358) and 5′ mUsfCmUmAmAfCfCmGmAfGfCfUmGfAmUmGmGfAmCdTdT 3′ (SEQ ID NO: 5359). The letter “m” before the nucleotide indicates a 2′O-methyl substitution, the letter “f” indicates a 2′flouro substitution, the letter “d” indicates a deoxyribonucleotide substitution, and the letter “s” indicates a phosphorothioate linkage. Naked siRNA is resuspended in Opti-MEM, and 400 ug siRNA in 200 μL volume is delivered to each nostril with a micropipette.

[0565] Antibodies to OVA are measured using enzyme-linked immunosorbent assay (ELISA). Blood samples are collected from the pinna vein on day 13 to measure OVA-specific IgG levels. ELISA is performed according to the protocol of a previous study. The titers of samples are calculated by comparison with internal standard serum, prepared from the rabbits immunized with 2.5% OVA plus 0.4% alum eight times. The value of this standard is arbitrarily calculated as 10,000 U/ml.

[0566] Histopathological analysis of nasal tissue is carried out on tissue fixed with 10% neutral buffered formalin solution for 1 week, decalcified in 0.5 mol/L of ethylenediaminetetraacetic acid at 37° C., embedded in paraffin, and cut into 2-μm-thick sections. After hematoxylin-eosin staining, histopathological analysis is performed by selecting a representative field of mucosa per sinus where the most prominent change is detected with 200× magnification. The number of eosinophils and the area of mucosa in each field are measured to calculate the density of eosinophils (cells/mm²). The width of the lamina propria (μm) is measured as an indirect indication of mucosal hypertrophy. The degree of polyp formation is graded semiquantitatively according to the following score: 0=little or no polyp formation detected; 1=slight (slight prominence of mucosa); 2=moderate (polyp of a size from one-quarter to one-half of the field); 3=severe (polyp of a size more than one-half of the field).

[0567] ALOX15 mRNA knockdown is quantified using real-time polymerase chain reaction. Total RNA is reverse transcribed to cDNA using a First-Strand III cDNA Synthesis kit (Invitrogen, Carlsbad, Calif.). Real-time quantitative polymerase chain reaction (PCR) is performed using the ABI Prism 7900 Sequence Detection System (Applied Biosystems, Foster City, Calif.). Amplification by PCR is performed according to the manufacturer's protocols (Applied Biosystems). Primers and probes for ALOX15 used in this study and p-actin are designed with the assistance of the computer program Primer Express (Applied Biosystems). Searches using a nucleotide basic local alignment search tool (BLASTN) database are conducted to confirm their specificity and the absence of DNA polymorphisms.

### Example 16. Sequences

[0568] SEQ ID NOS: 1-5349, 5366-5971, 6000-6038, 6050-6074 are exemplary ALOX15 siRNA sequences directed against human ALOX15 mRNA. The sequences are listed in the 5′-3′ orientation. Sequence ID numbers are indicated prior to each sequence. In some embodiments, for SEQ ID NOS: 1-5349, odd numbered sequences are the sense, or passenger, strand and even numbered sequences in each strand are the antisense, or guide, strand. Each sense and antisense strand can be annealed to produce the siRNA. In some embodiments, at least the final two 3′ nucleotides in each strand are substituted with different nucleotides. In some embodiments, one or more nucleotides in each sequence is modified. Table 11 outlines some sequences provided in this disclosure.

TABLE 11
Certain Sequences

| SEQ ID | |
|---|---|
| NO | PROTEIN/GENE |
| 1-5349 | ALOX15 siRNA oligonucleotide sequences |
| 5350 | An RFGF containing a hydrophobic membrane |
| | translocation sequence (MTS) peptide |
| 5351 | An RFGF analogue containing a hydrophobic |
| | membrane translocation sequence (MTS) |
| | peptide |
| 5352 | Peptide from HIV Tat protein |
| 5353 | Peptide from Drosophila Antennapedia protein |
| 5354 | ALOX15 targeting siRNA sense |
| 5355 | ALOX15 targeting siRNA antisense |
| 5356 | Full-length ALOX15 murine mRNA |
| | (GenBank Acc. # NM_009660.3) |
| 5357 | Full-length ALOX15 human mRNA |
| | (GenBank Acc. # NM_001140.4) |
| 5358 | Non-targeting control siRNA sense |
| 5359 | Non-targeting control siRNA antisense |
| 5360 | ALOX15 targeting siRNA sense |
| 5361 | ALOX15 targeting siRNA antisense |
| 5362 | Non-targeting control siRNA sense |
| 5363 | Non-targeting control siRNA antisense |
| 5364 | ALOX15 targeting siRNA sense |
| 5365 | ALOX15 targeting siRNA antisense |

[0569] The foregoing is considered as illustrative only of the principles of the invention. Furthermore, since numerous modifications and changes will readily occur to those skilled in the art, it is not desired to limit the invention to the exact construction and operation shown and described. Therefore, all suitable modifications and equivalents fall within the scope of the invention.

The application's sequence listing, which the Patent Office published only in electronic form, follows.

SEQUENCE LISTING (6074 sequences)

SEQ ID NO: 1 - RNA, 21 nt, Artificial Sequence
  Description of Artificial Sequence: Synthetic oligonucleotide
gagcgaaacaucuuugagcaa

SEQ ID NO: 2 - RNA, 21 nt, Artificial Sequence
  Description of Artificial Sequence: Synthetic oligonucleotide
gcucaaagauguuucgcucaa

SEQ ID NO: 3 - RNA, 21 nt, Artificial Sequence
  Description of Artificial Sequence: Synthetic oligonucleotide
agcgaaacaucuuugagcaag

SEQ ID NO: 4 - RNA, 21 nt, Artificial Sequence
  Description of Artificial Sequence: Synthetic oligonucleotide
ugcucaaagauguuucgcuca

SEQ ID NO: 5 - RNA, 21 nt, Artificial Sequence
  Description of Artificial Sequence: Synthetic oligonucleotide
gcgaaacaucuuugagcaaga

SEQ ID NO: 6 - RNA, 21 nt, Artificial Sequence
  Description of Artificial Sequence: Synthetic oligonucleotide
uugcucaaagauguuucgcuc

SEQ ID NO: 7 - RNA, 21 nt, Artificial Sequence
  Description of Artificial Sequence: Synthetic oligonucleotide
cgaaacaucuuugagcaagau

SEQ ID NO: 8 - RNA, 21 nt, Artificial Sequence
  Description of Artificial Sequence: Synthetic oligonucleotide
cuugcucaaagauguuucgcu

SEQ ID NO: 9 - RNA, 21 nt, Artificial Sequence
  Description of Artificial Sequence: Synthetic oligonucleotide
gaaacaucuuugagcaagaug

SEQ ID NO: 10 - RNA, 21 nt, Artificial Sequence
  Description of Artificial Sequence: Synthetic oligonucleotide
ucuugcucaaagauguuucgc

SEQ ID NO: 11 - RNA, 21 nt, Artificial Sequence
  Description of Artificial Sequence: Synthetic oligonucleotide
aaacaucuuugagcaagaugg

SEQ ID NO: 12 - RNA, 21 nt, Artificial Sequence
  Description of Artificial Sequence: Synthetic oligonucleotide
aucuugcucaaagauguuucg

SEQ ID NO: 13 - RNA, 21 nt, Artificial Sequence
  Description of Artificial Sequence: Synthetic oligonucleotide
aacaucuuugagcaagauggg

SEQ ID NO: 14 - RNA, 21 nt, Artificial Sequence
  Description of Artificial Sequence: Synthetic oligonucleotide
caucuugcucaaagauguuuc

SEQ ID NO: 15 - RNA, 21 nt, Artificial Sequence
  Description of Artificial Sequence: Synthetic oligonucleotide
acaucuuugagcaagaugggu

SEQ ID NO: 16 - RNA, 21 nt, Artificial Sequence
  Description of Artificial Sequence: Synthetic oligonucleotide
ccaucuugcucaaagauguuu

SEQ ID NO: 17 - RNA, 21 nt, Artificial Sequence
  Description of Artificial Sequence: Synthetic oligonucleotide
caucuuugagcaagauggguc

SEQ ID NO: 18 - RNA, 21 nt, Artificial Sequence
  Description of Artificial Sequence: Synthetic oligonucleotide
cccaucuugcucaaagauguu

SEQ ID NO: 19 - RNA, 21 nt, Artificial Sequence
  Description of Artificial Sequence: Synthetic oligonucleotide
aucuuugagcaagaugggucu

SEQ ID NO: 20 - RNA, 21 nt, Artificial Sequence
  Description of Artificial Sequence: Synthetic oligonucleotide
acccaucuugcucaaagaugu

SEQ ID NO: 21 - RNA, 21 nt, Artificial Sequence
  Description of Artificial Sequence: Synthetic oligonucleotide
ucuuugagcaagaugggucuc

SEQ ID NO: 22 - RNA, 21 nt, Artificial Sequence
  Description of Artificial Sequence: Synthetic oligonucleotide
gacccaucuugcucaaagaug

SEQ ID NO: 23 - RNA, 21 nt, Artificial Sequence
  Description of Artificial Sequence: Synthetic oligonucleotide
cuuugagcaagaugggucucu

SEQ ID NO: 24 - RNA, 21 nt, Artificial Sequence
  Description of Artificial Sequence: Synthetic oligonucleotide
agacccaucuugcucaaagau

SEQ ID NO: 25 - RNA, 21 nt, Artificial Sequence
  Description of Artificial Sequence: Synthetic oligonucleotide
uuugagcaagaugggucucua

SEQ ID NO: 26 - RNA, 21 nt, Artificial Sequence
  Description of Artificial Sequence: Synthetic oligonucleotide
gagacccaucuugcucaaaga

SEQ ID NO: 27 - RNA, 21 nt, Artificial Sequence
  Description of Artificial Sequence: Synthetic oligonucleotide
uugagcaagaugggucucuac

SEQ ID NO: 28 - RNA, 21 nt, Artificial Sequence
  Description of Artificial Sequence: Synthetic oligonucleotide
agagacccaucuugcucaaag

SEQ ID NO: 29 - RNA, 21 nt, Artificial Sequence
  Description of Artificial Sequence: Synthetic oligonucleotide
ugagcaagaugggucucuacc

SEQ ID NO: 30 - RNA, 21 nt, Artificial Sequence
  Description of Artificial Sequence: Synthetic oligonucleotide
uagagacccaucuugcucaaa

SEQ ID NO: 31 - RNA, 21 nt, Artificial Sequence
  Description of Artificial Sequence: Synthetic oligonucleotide
gagcaagaugggucucuaccg

SEQ ID NO: 32 - RNA, 21 nt, Artificial Sequence
  Description of Artificial Sequence: Synthetic oligonucleotide
guagagacccaucuugcucaa

SEQ ID NO: 33 - RNA, 21 nt, Artificial Sequence
  Description of Artificial Sequence: Synthetic oligonucleotide
agcaagaugggucucuaccgc

SEQ ID NO: 34 - RNA, 21 nt, Artificial Sequence
  Description of Artificial Sequence: Synthetic oligonucleotide
gguagagacccaucuugcuca

SEQ ID NO: 35 - RNA, 21 nt, Artificial Sequence
  Description of Artificial Sequence: Synthetic oligonucleotide
gcaagaugggucucuaccgca

SEQ ID NO: 36 - RNA, 21 nt, Artificial Sequence
  Description of Artificial Sequence: Synthetic oligonucleotide
cgguagagacccaucuugcuc

SEQ ID NO: 37 - RNA, 21 nt, Artificial Sequence
  Description of Artificial Sequence: Synthetic oligonucleotide
caagaugggucucuaccgcau

SEQ ID NO: 38 - RNA, 21 nt, Artificial Sequence
  Description of Artificial Sequence: Synthetic oligonucleotide
gcgguagagacccaucuugcu

SEQ ID NO: 39 - RNA, 21 nt, Artificial Sequence
  Description of Artificial Sequence: Synthetic oligonucleotide
aagaugggucucuaccgcauc

SEQ ID NO: 40 - RNA, 21 nt, Artificial Sequence
  Description of Artificial Sequence: Synthetic oligonucleotide
ugcgguagagacccaucuugc

SEQ ID NO: 41 - RNA, 21 nt, Artificial Sequence
  Description of Artificial Sequence: Synthetic oligonucleotide
agaugggucucuaccgcaucc

SEQ ID NO: 42 - RNA, 21 nt, Artificial Sequence
  Description of Artificial Sequence: Synthetic oligonucleotide
augcgguagagacccaucuug

SEQ ID NO: 43 - RNA, 21 nt, Artificial Sequence
  Description of Artificial Sequence: Synthetic oligonucleotide
gaugggucucuaccgcauccg

SEQ ID NO: 44 - RNA, 21 nt, Artificial Sequence
  Description of Artificial Sequence: Synthetic oligonucleotide
gaugcgguagagacccaucuu

SEQ ID NO: 45 - RNA, 21 nt, Artificial Sequence
  Description of Artificial Sequence: Synthetic oligonucleotide
augggucucuaccgcauccgc

SEQ ID NO: 46 - RNA, 21 nt, Artificial Sequence
  Description of Artificial Sequence: Synthetic oligonucleotide
ggaugcgguagagacccaucu

SEQ ID NO: 47 - RNA, 21 nt, Artificial Sequence
  Description of Artificial Sequence: Synthetic oligonucleotide
ugggucucuaccgcauccgcg

SEQ ID NO: 48 - RNA, 21 nt, Artificial Sequence
  Description of Artificial Sequence: Synthetic oligonucleotide
cggaugcgguagagacccauc

SEQ ID NO: 49 - RNA, 21 nt, Artificial Sequence
  Description of Artificial Sequence: Synthetic oligonucleotide
gggucucuaccgcauccgcgu

SEQ ID NO: 50 - RNA, 21 nt, Artificial Sequence
  Description of Artificial Sequence: Synthetic oligonucleotide
gcggaugcgguagagacccau

SEQ ID NO: 51 - RNA, 21 nt, Artificial Sequence
  Description of Artificial Sequence: Synthetic oligonucleotide
ggucucuaccgcauccgcgug

SEQ ID NO: 52 - RNA, 21 nt, Artificial Sequence
  Description of Artificial Sequence: Synthetic oligonucleotide
cgcggaugcgguagagaccca

SEQ ID NO: 53 - RNA, 21 nt, Artificial Sequence
  Description of Artificial Sequence: Synthetic oligonucleotide
gucucuaccgcauccgcgugu

SEQ ID NO: 54 - RNA, 21 nt, Artificial Sequence
  Description of Artificial Sequence: Synthetic oligonucleotide
acgcggaugcgguagagaccc

SEQ ID NO: 55 - RNA, 21 nt, Artificial Sequence
  Description of Artificial Sequence: Synthetic oligonucleotide
ucucuaccgcauccgcguguc

SEQ ID NO: 56 - RNA, 21 nt, Artificial Sequence
  Description of Artificial Sequence: Synthetic oligonucleotide
cacgcggaugcgguagagacc

SEQ ID NO: 57 - RNA, 21 nt, Artificial Sequence
  Description of Artificial Sequence: Synthetic oligonucleotide
cucuaccgcauccgcgugucc

SEQ ID NO: 58 - RNA, 21 nt, Artificial Sequence
  Description of Artificial Sequence: Synthetic oligonucleotide
acacgcggaugcgguagagac

SEQ ID NO: 59 - RNA, 21 nt, Artificial Sequence
  Description of Artificial Sequence: Synthetic oligonucleotide
ucuaccgcauccgcgugucca

SEQ ID NO: 60 - RNA, 21 nt, Artificial Sequence
  Description of Artificial Sequence: Synthetic oligonucleotide
gacacgcggaugcgguagaga

SEQ ID NO: 61 - RNA, 21 nt, Artificial Sequence
  Description of Artificial Sequence: Synthetic oligonucleotide
cuaccgcauccgcguguccac

SEQ ID NO: 62 - RNA, 21 nt, Artificial Sequence
  Description of Artificial Sequence: Synthetic oligonucleotide
ggacacgcggaugcgguagag

SEQ ID NO: 63 - RNA, 21 nt, Artificial Sequence
  Description of Artificial Sequence: Synthetic oligonucleotide
uaccgcauccgcguguccacu

SEQ ID NO: 64 - RNA, 21 nt, Artificial Sequence
  Description of Artificial Sequence: Synthetic oligonucleotide
uggacacgcggaugcgguaga

SEQ ID NO: 65 - RNA, 21 nt, Artificial Sequence
  Description of Artificial Sequence: Synthetic oligonucleotide
accgcauccgcguguccacug

SEQ ID NO: 66 - RNA, 21 nt, Artificial Sequence
  Description of Artificial Sequence: Synthetic oligonucleotide
guggacacgcggaugcgguag

SEQ ID NO: 67 - RNA, 21 nt, Artificial Sequence
  Description of Artificial Sequence: Synthetic oligonucleotide
ccgcauccgcguguccacugg

SEQ ID NO: 68 - RNA, 21 nt, Artificial Sequence
  Description of Artificial Sequence: Synthetic oligonucleotide
aguggacacgcggaugcggua

SEQ ID NO: 69 - RNA, 21 nt, Artificial Sequence
  Description of Artificial Sequence: Synthetic oligonucleotide
cgcauccgcguguccacuggg

SEQ ID NO: 70 - RNA, 21 nt, Artificial Sequence
  Description of Artificial Sequence: Synthetic oligonucleotide
caguggacacgcggaugcggu

SEQ ID NO: 71 - RNA, 21 nt, Artificial Sequence
  Description of Artificial Sequence: Synthetic oligonucleotide
gcauccgcguguccacugggg

SEQ ID NO: 72 - RNA, 21 nt, Artificial Sequence
  Description of Artificial Sequence: Synthetic oligonucleotide
ccaguggacacgcggaugcgg

SEQ ID NO: 73 - RNA, 21 nt, Artificial Sequence
  Description of Artificial Sequence: Synthetic oligonucleotide
cauccgcguguccacuggggc

SEQ ID NO: 74 - RNA, 21 nt, Artificial Sequence
  Description of Artificial Sequence: Synthetic oligonucleotide
cccaguggacacgcggaugcg

SEQ ID NO: 75 - RNA, 21 nt, Artificial Sequence
  Description of Artificial Sequence: Synthetic oligonucleotide
auccgcguguccacuggggcc

SEQ ID NO: 76 - RNA, 21 nt, Artificial Sequence
  Description of Artificial Sequence: Synthetic oligonucleotide
ccccaguggacacgcggaugc

SEQ ID NO: 77 - RNA, 21 nt, Artificial Sequence
  Description of Artificial Sequence: Synthetic oligonucleotide
uccgcguguccacuggggccu

SEQ ID NO: 78 - RNA, 21 nt, Artificial Sequence
  Description of Artificial Sequence: Synthetic oligonucleotide
gccccaguggacacgcggaug

SEQ ID NO: 79 - RNA, 21 nt, Artificial Sequence
  Description of Artificial Sequence: Synthetic oligonucleotide
ccgcguguccacuggggccuc

SEQ ID NO: 80 - RNA, 21 nt, Artificial Sequence
  Description of Artificial Sequence: Synthetic oligonucleotide
ggccccaguggacacgcggau

SEQ ID NO: 81 - RNA, 21 nt, Artificial Sequence
  Description of Artificial Sequence: Synthetic oligonucleotide
cgcguguccacuggggccucg

SEQ ID NO: 82 - RNA, 21 nt, Artificial Sequence
  Description of Artificial Sequence: Synthetic oligonucleotide
aggccccaguggacacgcgga

SEQ ID NO: 83 - RNA, 21 nt, Artificial Sequence
  Description of Artificial Sequence: Synthetic oligonucleotide
gcguguccacuggggccucgc

SEQ ID NO: 84 - RNA, 21 nt, Artificial Sequence
  Description of Artificial Sequence: Synthetic oligonucleotide
gaggccccaguggacacgcgg

SEQ ID NO: 85 - RNA, 21 nt, Artificial Sequence
  Description of Artificial Sequence: Synthetic oligonucleotide
cguguccacuggggccucgcu

SEQ ID NO: 86 - RNA, 21 nt, Artificial Sequence
  Description of Artificial Sequence: Synthetic oligonucleotide
cgaggccccaguggacacgcg

SEQ ID NO: 87 - RNA, 21 nt, Artificial Sequence
  Description of Artificial Sequence: Synthetic oligonucleotide
guguccacuggggccucgcuc

SEQ ID NO: 88 - RNA, 21 nt, Artificial Sequence
  Description of Artificial Sequence: Synthetic oligonucleotide
gcgaggccccaguggacacgc

SEQ ID NO: 89 - RNA, 21 nt, Artificial Sequence
  Description of Artificial Sequence: Synthetic oligonucleotide
uguccacuggggccucgcucu

SEQ ID NO: 90 - RNA, 21 nt, Artificial Sequence
  Description of Artificial Sequence: Synthetic oligonucleotide
agcgaggccccaguggacacg

SEQ ID NO: 91 - RNA, 21 nt, Artificial Sequence
  Description of Artificial Sequence: Synthetic oligonucleotide
guccacuggggccucgcucua

SEQ ID NO: 92 - RNA, 21 nt, Artificial Sequence
  Description of Artificial Sequence: Synthetic oligonucleotide
gagcgaggccccaguggacac

SEQ ID NO: 93 - RNA, 21 nt, Artificial Sequence
  Description of Artificial Sequence: Synthetic oligonucleotide
uccacuggggccucgcucuau

SEQ ID NO: 94 - RNA, 21 nt, Artificial Sequence
  Description of Artificial Sequence: Synthetic oligonucleotide
agagcgaggccccaguggaca

SEQ ID NO: 95 - RNA, 21 nt, Artificial Sequence
  Description of Artificial Sequence: Synthetic oligonucleotide
ccacuggggccucgcucuaug

SEQ ID NO: 96 - RNA, 21 nt, Artificial Sequence
  Description of Artificial Sequence: Synthetic oligonucleotide
uagagcgaggccccaguggac

SEQ ID NO: 97 - RNA, 21 nt, Artificial Sequence
  Description of Artificial Sequence: Synthetic oligonucleotide
cacuggggccucgcucuaugc

SEQ ID NO: 98 - RNA, 21 nt, Artificial Sequence
  Description of Artificial Sequence: Synthetic oligonucleotide
auagagcgaggccccagugga

SEQ ID NO: 99 - RNA, 21 nt, Artificial Sequence
  Description of Artificial Sequence: Synthetic oligonucleotide
acuggggccucgcucuaugcc

SEQ ID NO: 100 - RNA, 21 nt, Artificial Sequence
  Description of Artificial Sequence: Synthetic oligonucleotide
cauagagcgaggccccagugg

SEQ ID NO: 101 - RNA, 21 nt, Artificial Sequence
  Description of Artificial Sequence: Synthetic oligonucleotide
cuggggccucgcucuaugccg

SEQ ID NO: 102 - RNA, 21 nt, Artificial Sequence
  Description of Artificial Sequence: Synthetic oligonucleotide
gcauagagcgaggccccagug

SEQ ID NO: 103 - RNA, 21 nt, Artificial Sequence
  Description of Artificial Sequence: Synthetic oligonucleotide
uggggccucgcucuaugccgg

SEQ ID NO: 104 - RNA, 21 nt, Artificial Sequence
  Description of Artificial Sequence: Synthetic oligonucleotide
ggcauagagcgaggccccagu

SEQ ID NO: 105 - RNA, 21 nt, Artificial Sequence
  Description of Artificial Sequence: Synthetic oligonucleotide
ggggccucgcucuaugccggu

SEQ ID NO: 106 - RNA, 21 nt, Artificial Sequence
  Description of Artificial Sequence: Synthetic oligonucleotide
cggcauagagcgaggccccag

SEQ ID NO: 107 - RNA, 21 nt, Artificial Sequence
  Description of Artificial Sequence: Synthetic oligonucleotide
gggccucgcucuaugccgguu

SEQ ID NO: 108 - RNA, 21 nt, Artificial Sequence
  Description of Artificial Sequence: Synthetic oligonucleotide
ccggcauagagcgaggcccca

SEQ ID NO: 109 - RNA, 21 nt, Artificial Sequence
  Description of Artificial Sequence: Synthetic oligonucleotide
ggccucgcucuaugccgguuc

SEQ ID NO: 110 - RNA, 21 nt, Artificial Sequence
  Description of Artificial Sequence: Synthetic oligonucleotide
accggcauagagcgaggcccc

SEQ ID NO: 111 - RNA, 21 nt, Artificial Sequence
  Description of Artificial Sequence: Synthetic oligonucleotide
gccucgcucuaugccgguucc

SEQ ID NO: 112 - RNA, 21 nt, Artificial Sequence
  Description of Artificial Sequence: Synthetic oligonucleotide
aaccggcauagagcgaggccc

SEQ ID NO: 113 - RNA, 21 nt, Artificial Sequence
  Description of Artificial Sequence: Synthetic oligonucleotide
ccucgcucuaugccgguucca

SEQ ID NO: 114 - RNA, 21 nt, Artificial Sequence
  Description of Artificial Sequence: Synthetic oligonucleotide
gaaccggcauagagcgaggcc

SEQ ID NO: 115 - RNA, 21 nt, Artificial Sequence
  Description of Artificial Sequence: Synthetic oligonucleotide
cucgcucuaugccgguuccaa

SEQ ID NO: 116 - RNA, 21 nt, Artificial Sequence
  Description of Artificial Sequence: Synthetic oligonucleotide
ggaaccggcauagagcgaggc

SEQ ID NO: 117 - RNA, 21 nt, Artificial Sequence
  Description of Artificial Sequence: Synthetic oligonucleotide
ucgcucuaugccgguuccaac

SEQ ID NO: 118 - RNA, 21 nt, Artificial Sequence
  Description of Artificial Sequence: Synthetic oligonucleotide
uggaaccggcauagagcgagg

SEQ ID NO: 119 - RNA, 21 nt, Artificial Sequence
  Description of Artificial Sequence: Synthetic oligonucleotide
cgcucuaugccgguuccaaca

SEQ ID NO: 120 - RNA, 21 nt, Artificial Sequence
  Description of Artificial Sequence: Synthetic oligonucleotide
uuggaaccggcauagagcgag

SEQ ID NO: 121 - RNA, 21 nt, Artificial Sequence
  Description of Artificial Sequence: Synthetic oligonucleotide
gcucuaugccgguuccaacaa

SEQ ID NO: 122 - RNA, 21 nt, Artificial Sequence
  Description of Artificial Sequence: Synthetic oligonucleotide
guuggaaccggcauagagcga

SEQ ID NO: 123 - RNA, 21 nt, Artificial Sequence
  Description of Artificial Sequence: Synthetic oligonucleotide
cucuaugccgguuccaacaac

SEQ ID NO: 124 - RNA, 21 nt, Artificial Sequence
  Description of Artificial Sequence: Synthetic oligonucleotide
uguuggaaccggcauagagcg

SEQ ID NO: 125 - RNA, 21 nt, Artificial Sequence
  Description of Artificial Sequence: Synthetic oligonucleotide
ucuaugccgguuccaacaacc

SEQ ID NO: 126 - RNA, 21 nt, Artificial Sequence
  Description of Artificial Sequence: Synthetic oligonucleotide
uuguuggaaccggcauagagc

SEQ ID NO: 127 - RNA, 21 nt, Artificial Sequence
  Description of Artificial Sequence: Synthetic oligonucleotide
cuaugccgguuccaacaacca

SEQ ID NO: 128 - RNA, 21 nt, Artificial Sequence
  Description of Artificial Sequence: Synthetic oligonucleotide
guuguuggaaccggcauagag

SEQ ID NO: 129 - RNA, 21 nt, Artificial Sequence
  Description of Artificial Sequence: Synthetic oligonucleotide
uaugccgguuccaacaaccag

SEQ ID NO: 130 - RNA, 21 nt, Artificial Sequence
  Description of Artificial Sequence: Synthetic oligonucleotide
gguuguuggaaccggcauaga

SEQ ID NO: 131 - RNA, 21 nt, Artificial Sequence
  Description of Artificial Sequence: Synthetic oligonucleotide
augccgguuccaacaaccagg

SEQ ID NO: 132 - RNA, 21 nt, Artificial Sequence
  Description of Artificial Sequence: Synthetic oligonucleotide
ugguuguuggaaccggcauag

SEQ ID NO: 133 - RNA, 21 nt, Artificial Sequence
  Description of Artificial Sequence: Synthetic oligonucleotide
ugccgguuccaacaaccaggu

SEQ ID NO: 134 - RNA, 21 nt, Artificial Sequence
  Description of Artificial Sequence: Synthetic oligonucleotide
cugguuguuggaaccggcaua

SEQ ID NO: 135 - RNA, 21 nt, Artificial Sequence
  Description of Artificial Sequence: Synthetic oligonucleotide
gccgguuccaacaaccaggug

SEQ ID NO: 136 - RNA, 21 nt, Artificial Sequence
  Description of Artificial Sequence: Synthetic oligonucleotide
ccugguuguuggaaccggcau

SEQ ID NO: 137 - RNA, 21 nt, Artificial Sequence
  Description of Artificial Sequence: Synthetic oligonucleotide
ccgguuccaacaaccaggugc

SEQ ID NO: 138 - RNA, 21 nt, Artificial Sequence
  Description of Artificial Sequence: Synthetic oligonucleotide
accugguuguuggaaccggca

SEQ ID NO: 139 - RNA, 21 nt, Artificial Sequence
  Description of Artificial Sequence: Synthetic oligonucleotide
cgguuccaacaaccaggugca

SEQ ID NO: 140 - RNA, 21 nt, Artificial Sequence
  Description of Artificial Sequence: Synthetic oligonucleotide
caccugguuguuggaaccggc

SEQ ID NO: 141 - RNA, 21 nt, Artificial Sequence
  Description of Artificial Sequence: Synthetic oligonucleotide
gguuccaacaaccaggugcag

SEQ ID NO: 142 - RNA, 21 nt, Artificial Sequence
  Description of Artificial Sequence: Synthetic oligonucleotide
gcaccugguuguuggaaccgg

SEQ ID NO: 143 - RNA, 21 nt, Artificial Sequence
  Description of Artificial Sequence: Synthetic oligonucleotide
guuccaacaaccaggugcagc

SEQ ID NO: 144 - RNA, 21 nt, Artificial Sequence
  Description of Artificial Sequence: Synthetic oligonucleotide
ugcaccugguuguuggaaccg

SEQ ID NO: 145 - RNA, 21 nt, Artificial Sequence
  Description of Artificial Sequence: Synthetic oligonucleotide
uuccaacaaccaggugcagcu

SEQ ID NO: 146 - RNA, 21 nt, Artificial Sequence
  Description of Artificial Sequence: Synthetic oligonucleotide
cugcaccugguuguuggaacc

SEQ ID NO: 147 - RNA, 21 nt, Artificial Sequence
  Description of Artificial Sequence: Synthetic oligonucleotide
uccaacaaccaggugcagcug

SEQ ID NO: 148 - RNA, 21 nt, Artificial Sequence
  Description of Artificial Sequence: Synthetic oligonucleotide
gcugcaccugguuguuggaac

SEQ ID NO: 149 - RNA, 21 nt, Artificial Sequence
  Description of Artificial Sequence: Synthetic oligonucleotide
ccaacaaccaggugcagcugu

SEQ ID NO: 150 - RNA, 21 nt, Artificial Sequence
  Description of Artificial Sequence: Synthetic oligonucleotide
agcugcaccugguuguuggaa

SEQ ID NO: 151 - RNA, 21 nt, Artificial Sequence
  Description of Artificial Sequence: Synthetic oligonucleotide
caacaaccaggugcagcugug

SEQ ID NO: 152 - RNA, 21 nt, Artificial Sequence
  Description of Artificial Sequence: Synthetic oligonucleotide
cagcugcaccugguuguugga

SEQ ID NO: 153 - RNA, 21 nt, Artificial Sequence
  Description of Artificial Sequence: Synthetic oligonucleotide
aacaaccaggugcagcugugg

SEQ ID NO: 154 - RNA, 21 nt, Artificial Sequence
  Description of Artificial Sequence: Synthetic oligonucleotide
acagcugcaccugguuguugg

SEQ ID NO: 155 - RNA, 21 nt, Artificial Sequence
  Description of Artificial Sequence: Synthetic oligonucleotide
acaaccaggugcagcuguggc

SEQ ID NO: 156 - RNA, 21 nt, Artificial Sequence
  Description of Artificial Sequence: Synthetic oligonucleotide
cacagcugcaccugguuguug

SEQ ID NO: 157 - RNA, 21 nt, Artificial Sequence
  Description of Artificial Sequence: Synthetic oligonucleotide
caaccaggugcagcuguggcu

SEQ ID NO: 158 - RNA, 21 nt, Artificial Sequence
  Description of Artificial Sequence: Synthetic oligonucleotide
ccacagcugcaccugguuguu

SEQ ID NO: 159 - RNA, 21 nt, Artificial Sequence
  Description of Artificial Sequence: Synthetic oligonucleotide
aaccaggugcagcuguggcug

SEQ ID NO: 160 - RNA, 21 nt, Artificial Sequence
  Description of Artificial Sequence: Synthetic oligonucleotide
gccacagcugcaccugguugu

SEQ ID NO: 161 - RNA, 21 nt, Artificial Sequence
  Description of Artificial Sequence: Synthetic oligonucleotide
accaggugcagcuguggcugg

SEQ ID NO: 162 - RNA, 21 nt, Artificial Sequence
  Description of Artificial Sequence: Synthetic oligonucleotide
agccacagcugcaccugguug

SEQ ID NO: 163 - RNA, 21 nt, Artificial Sequence
  Description of Artificial Sequence: Synthetic oligonucleotide
ccaggugcagcuguggcuggu

SEQ ID NO: 164 - RNA, 21 nt, Artificial Sequence
  Description of Artificial Sequence: Synthetic oligonucleotide
cagccacagcugcaccugguu

SEQ ID NO: 165 - RNA, 21 nt, Artificial Sequence
  Description of Artificial Sequence: Synthetic oligonucleotide
caggugcagcuguggcugguc

SEQ ID NO: 166 - RNA, 21 nt, Artificial Sequence
  Description of Artificial Sequence: Synthetic oligonucleotide
ccagccacagcugcaccuggu

SEQ ID NO: 167 - RNA, 21 nt, Artificial Sequence
  Description of Artificial Sequence: Synthetic oligonucleotide
aggugcagcuguggcuggucg

SEQ ID NO: 168 - RNA, 21 nt, Artificial Sequence
  Description of Artificial Sequence: Synthetic oligonucleotide
accagccacagcugcaccugg

SEQ ID NO: 169 - RNA, 21 nt, Artificial Sequence
  Description of Artificial Sequence: Synthetic oligonucleotide
ggugcagcuguggcuggucgg

SEQ ID NO: 170 - RNA, 21 nt, Artificial Sequence
  Description of Artificial Sequence: Synthetic oligonucleotide
gaccagccacagcugcaccug

SEQ ID NO: 171 - RNA, 21 nt, Artificial Sequence
  Description of Artificial Sequence: Synthetic oligonucleotide
gugcagcuguggcuggucggc

SEQ ID NO: 172 - RNA, 21 nt, Artificial Sequence
  Description of Artificial Sequence: Synthetic oligonucleotide
cgaccagccacagcugcaccu

SEQ ID NO: 173 - RNA, 21 nt, Artificial Sequence
  Description of Artificial Sequence: Synthetic oligonucleotide
ugcagcuguggcuggucggcc

SEQ ID NO: 174 - RNA, 21 nt, Artificial Sequence
  Description of Artificial Sequence: Synthetic oligonucleotide
ccgaccagccacagcugcacc

SEQ ID NO: 175 - RNA, 21 nt, Artificial Sequence
  Description of Artificial Sequence: Synthetic oligonucleotide
gcagcuguggcuggucggcca

SEQ ID NO: 176 - RNA, 21 nt, Artificial Sequence
  Description of Artificial Sequence: Synthetic oligonucleotide
gccgaccagccacagcugcac

SEQ ID NO: 177 - RNA, 21 nt, Artificial Sequence
  Description of Artificial Sequence: Synthetic oligonucleotide
cagcuguggcuggucggccag

SEQ ID NO: 178 - RNA, 21 nt, Artificial Sequence
  Description of Artificial Sequence: Synthetic oligonucleotide
ggccgaccagccacagcugca

SEQ ID NO: 179 - RNA, 21 nt, Artificial Sequence
  Description of Artificial Sequence: Synthetic oligonucleotide
agcuguggcuggucggccagc

SEQ ID NO: 180 - RNA, 21 nt, Artificial Sequence
  Description of Artificial Sequence: Synthetic oligonucleotide
uggccgaccagccacagcugc

SEQ ID NO: 181 - RNA, 21 nt, Artificial Sequence
  Description of Artificial Sequence: Synthetic oligonucleotide
gcuguggcuggucggccagca

SEQ ID NO: 182 - RNA, 21 nt, Artificial Sequence
  Description of Artificial Sequence: Synthetic oligonucleotide
cuggccgaccagccacagcug

SEQ ID NO: 183 - RNA, 21 nt, Artificial Sequence
  Description of Artificial Sequence: Synthetic oligonucleotide
cuguggcuggucggccagcac

SEQ ID NO: 184 - RNA, 21 nt, Artificial Sequence
  Description of Artificial Sequence: Synthetic oligonucleotide
gcuggccgaccagccacagcu

SEQ ID NO: 185 - RNA, 21 nt, Artificial Sequence
  Description of Artificial Sequence: Synthetic oligonucleotide
uguggcuggucggccagcacg

SEQ ID NO: 186 - RNA, 21 nt, Artificial Sequence
  Description of Artificial Sequence: Synthetic oligonucleotide
ugcuggccgaccagccacagc

SEQ ID NO: 187 - RNA, 21 nt, Artificial Sequence
  Description of Artificial Sequence: Synthetic oligonucleotide
guggcuggucggccagcacgg

SEQ ID NO: 188 - RNA, 21 nt, Artificial Sequence
  Description of Artificial Sequence: Synthetic oligonucleotide
gugcuggccgaccagccacag

SEQ ID NO: 189 - RNA, 21 nt, Artificial Sequence
  Description of Artificial Sequence: Synthetic oligonucleotide
uggcuggucggccagcacggg

SEQ ID NO: 190 - RNA, 21 nt, Artificial Sequence
  Description of Artificial Sequence: Synthetic oligonucleotide
cgugcuggccgaccagccaca

SEQ ID NO: 191 - RNA, 21 nt, Artificial Sequence
  Description of Artificial Sequence: Synthetic oligonucleotide
ggcuggucggccagcacgggg

SEQ ID NO: 192 - RNA, 21 nt, Artificial Sequence
  Description of Artificial Sequence: Synthetic oligonucleotide
ccgugcuggccgaccagccac

SEQ ID NO: 193 - RNA, 21 nt, Artificial Sequence
  Description of Artificial Sequence: Synthetic oligonucleotide
gcuggucggccagcacgggga

SEQ ID NO: 194 - RNA, 21 nt, Artificial Sequence
  Description of Artificial Sequence: Synthetic oligonucleotide
cccgugcuggccgaccagcca

SEQ ID NO: 195 - RNA, 21 nt, Artificial Sequence
  Description of Artificial Sequence: Synthetic oligonucleotide
cuggucggccagcacggggag

SEQ ID NO: 196 - RNA, 21 nt, Artificial Sequence
  Description of Artificial Sequence: Synthetic oligonucleotide
ccccgugcuggccgaccagcc

SEQ ID NO: 197 - RNA, 21 nt, Artificial Sequence
  Description of Artificial Sequence: Synthetic oligonucleotide
uggucggccagcacggggagg

SEQ ID NO: 198 - RNA, 21 nt, Artificial Sequence
  Description of Artificial Sequence: Synthetic oligonucleotide
uccccgugcuggccgaccagc

SEQ ID NO: 199 - RNA, 21 nt, Artificial Sequence
  Description of Artificial Sequence: Synthetic oligonucleotide
ggucggccagcacggggaggc

SEQ ID NO: 200 - RNA, 21 nt, Artificial Sequence
  Description of Artificial Sequence: Synthetic oligonucleotide
cuccccgugcuggccgaccag

SEQ ID NO: 201 - RNA, 21 nt, Artificial Sequence
  Description of Artificial Sequence: Synthetic oligonucleotide
gucggccagcacggggaggcg

SEQ ID NO: 202 - RNA, 21 nt, Artificial Sequence
  Description of Artificial Sequence: Synthetic oligonucleotide
ccuccccgugcuggccgacca

SEQ ID NO: 203 - RNA, 21 nt, Artificial Sequence
  Description of Artificial Sequence: Synthetic oligonucleotide
ucggccagcacggggaggcgg

SEQ ID NO: 204 - RNA, 21 nt, Artificial Sequence
  Description of Artificial Sequence: Synthetic oligonucleotide
gccuccccgugcuggccgacc

SEQ ID NO: 205 - RNA, 21 nt, Artificial Sequence
  Description of Artificial Sequence: Synthetic oligonucleotide
cggccagcacggggaggcggc

SEQ ID NO: 206 - RNA, 21 nt, Artificial Sequence
  Description of Artificial Sequence: Synthetic oligonucleotide
cgccuccccgugcuggccgac

SEQ ID NO: 207 - RNA, 21 nt, Artificial Sequence
  Description of Artificial Sequence: Synthetic oligonucleotide
ggccagcacggggaggcggcg

SEQ ID NO: 208 - RNA, 21 nt, Artificial Sequence
  Description of Artificial Sequence: Synthetic oligonucleotide
ccgccuccccgugcuggccga

SEQ ID NO: 209 - RNA, 21 nt, Artificial Sequence
  Description of Artificial Sequence: Synthetic oligonucleotide
gccagcacggggaggcggcgc

SEQ ID NO: 210 - RNA, 21 nt, Artificial Sequence
  Description of Artificial Sequence: Synthetic oligonucleotide
gccgccuccccgugcuggccg

SEQ ID NO: 211 - RNA, 21 nt, Artificial Sequence
  Description of Artificial Sequence: Synthetic oligonucleotide
ccagcacggggaggcggcgcu

SEQ ID NO: 212 - RNA, 21 nt, Artificial Sequence
  Description of Artificial Sequence: Synthetic oligonucleotide
cgccgccuccccgugcuggcc

SEQ ID NO: 213 - RNA, 21 nt, Artificial Sequence
  Description of Artificial Sequence: Synthetic oligonucleotide
cagcacggggaggcggcgcuc

SEQ ID NO: 214 - RNA, 21 nt, Artificial Sequence
  Description of Artificial Sequence: Synthetic oligonucleotide
gcgccgccuccccgugcuggc

SEQ ID NO: 215 - RNA, 21 nt, Artificial Sequence
  Description of Artificial Sequence: Synthetic oligonucleotide
agcacggggaggcggcgcucg

SEQ ID NO: 216 - RNA, 21 nt, Artificial Sequence
  Description of Artificial Sequence: Synthetic oligonucleotide
agcgccgccuccccgugcugg

SEQ ID NO: 217 - RNA, 21 nt, Artificial Sequence
  Description of Artificial Sequence: Synthetic oligonucleotide
gcacggggaggcggcgcucgg

SEQ ID NO: 218 - RNA, 21 nt, Artificial Sequence
  Description of Artificial Sequence: Synthetic oligonucleotide
gagcgccgccuccccgugcug

SEQ ID NO: 219 - RNA, 21 nt, Artificial Sequence
  Description of Artificial Sequence: Synthetic oligonucleotide
cacggggaggcggcgcucggg

SEQ ID NO: 220 - RNA, 21 nt, Artificial Sequence
  Description of Artificial Sequence: Synthetic oligonucleotide
cgagcgccgccuccccgugcu

SEQ ID NO: 221 - RNA, 21 nt, Artificial Sequence
  Description of Artificial Sequence: Synthetic oligonucleotide
acggggaggcggcgcucggga

SEQ ID NO: 222 - RNA, 21 nt, Artificial Sequence
  Description of Artificial Sequence: Synthetic oligonucleotide
ccgagcgccgccuccccgugc

SEQ ID NO: 223 - RNA, 21 nt, Artificial Sequence
  Description of Artificial Sequence: Synthetic oligonucleotide
cggggaggcggcgcucgggaa

SEQ ID NO: 224 - RNA, 21 nt, Artificial Sequence
  Description of Artificial Sequence: Synthetic oligonucleotide
cccgagcgccgccuccccgug

SEQ ID NO: 225 - RNA, 21 nt, Artificial Sequence
  Description of Artificial Sequence: Synthetic oligonucleotide
ggggaggcggcgcucgggaag

SEQ ID NO: 226 - RNA, 21 nt, Artificial Sequence
  Description of Artificial Sequence: Synthetic oligonucleotide
ucccgagcgccgccuccccgu

SEQ ID NO: 227 - RNA, 21 nt, Artificial Sequence
  Description of Artificial Sequence: Synthetic oligonucleotide
gggaggcggcgcucgggaagc

SEQ ID NO: 228 - RNA, 21 nt, Artificial Sequence
  Description of Artificial Sequence: Synthetic oligonucleotide
uucccgagcgccgccuccccg

SEQ ID NO: 229 - RNA, 21 nt, Artificial Sequence
  Description of Artificial Sequence: Synthetic oligonucleotide
ggaggcggcgcucgggaagcg

SEQ ID NO: 230 - RNA, 21 nt, Artificial Sequence
  Description of Artificial Sequence: Synthetic oligonucleotide
cuucccgagcgccgccucccc

SEQ ID NO: 231 - RNA, 21 nt, Artificial Sequence
  Description of Artificial Sequence: Synthetic oligonucleotide
gaggcggcgcucgggaagcga

SEQ ID NO: 232 - RNA, 21 nt, Artificial Sequence
  Description of Artificial Sequence: Synthetic oligonucleotide
gcuucccgagcgccgccuccc

SEQ ID NO: 233 - RNA, 21 nt, Artificial Sequence
  Description of Artificial Sequence: Synthetic oligonucleotide
aggcggcgcucgggaagcgac

SEQ ID NO: 234 - RNA, 21 nt, Artificial Sequence
  Description of Artificial Sequence: Synthetic oligonucleotide
cgcuucccgagcgccgccucc

SEQ ID NO: 235 - RNA, 21 nt, Artificial Sequence
  Description of Artificial Sequence: Synthetic oligonucleotide
ggcggcgcucgggaagcgacu

SEQ ID NO: 236 - RNA, 21 nt, Artificial Sequence
  Description of Artificial Sequence: Synthetic oligonucleotide
ucgcuucccgagcgccgccuc

SEQ ID NO: 237 - RNA, 21 nt, Artificial Sequence
  Description of Artificial Sequence: Synthetic oligonucleotide
gcggcgcucgggaagcgacug

SEQ ID NO: 238 - RNA, 21 nt, Artificial Sequence
  Description of Artificial Sequence: Synthetic oligonucleotide
gucgcuucccgagcgccgccu

SEQ ID NO: 239 - RNA, 21 nt, Artificial Sequence
  Description of Artificial Sequence: Synthetic oligonucleotide
cggcgcucgggaagcgacugu

SEQ ID NO: 240 - RNA, 21 nt, Artificial Sequence
  Description of Artificial Sequence: Synthetic oligonucleotide
agucgcuucccgagcgccgcc

SEQ ID NO: 241 - RNA, 21 nt, Artificial Sequence
  Description of Artificial Sequence: Synthetic oligonucleotide
ggcgcucgggaagcgacugug

SEQ ID NO: 242 - RNA, 21 nt, Artificial Sequence
  Description of Artificial Sequence: Synthetic oligonucleotide
cagucgcuucccgagcgccgc

SEQ ID NO: 243 - RNA, 21 nt, Artificial Sequence
  Description of Artificial Sequence: Synthetic oligonucleotide
gcgcucgggaagcgacugugg

SEQ ID NO: 244 - RNA, 21 nt, Artificial Sequence
  Description of Artificial Sequence: Synthetic oligonucleotide
acagucgcuucccgagcgccg

SEQ ID NO: 245 - RNA, 21 nt, Artificial Sequence
  Description of Artificial Sequence: Synthetic oligonucleotide
cgcucgggaagcgacuguggc

SEQ ID NO: 246 - RNA, 21 nt, Artificial Sequence
  Description of Artificial Sequence: Synthetic oligonucleotide
cacagucgcuucccgagcgcc

SEQ ID NO: 247 - RNA, 21 nt, Artificial Sequence
  Description of Artificial Sequence: Synthetic oligonucleotide
gcucgggaagcgacuguggcc

SEQ ID NO: 248 - RNA, 21 nt, Artificial Sequence
  Description of Artificial Sequence: Synthetic oligonucleotide
ccacagucgcuucccgagcgc

SEQ ID NO: 249 - RNA, 21 nt, Artificial Sequence
  Description of Artificial Sequence: Synthetic oligonucleotide
cucgggaagcgacuguggccc

SEQ ID NO: 250 - RNA, 21 nt, Artificial Sequence
  Description of Artificial Sequence: Synthetic oligonucleotide
gccacagucgcuucccgagcg

SEQ ID NO: 251 - RNA, 21 nt, Artificial Sequence
  Description of Artificial Sequence: Synthetic oligonucleotide
ucgggaagcgacuguggcccg

SEQ ID NO: 252 - RNA, 21 nt, Artificial Sequence
  Description of Artificial Sequence: Synthetic oligonucleotide
ggccacagucgcuucccgagc

SEQ ID NO: 253 - RNA, 21 nt, Artificial Sequence
  Description of Artificial Sequence: Synthetic oligonucleotide
cgggaagcgacuguggcccgc

SEQ ID NO: 254 - RNA, 21 nt, Artificial Sequence
  Description of Artificial Sequence: Synthetic oligonucleotide
gggccacagucgcuucccgag

SEQ ID NO: 255 - RNA, 21 nt, Artificial Sequence
  Description of Artificial Sequence: Synthetic oligonucleotide
gggaagcgacuguggcccgca

SEQ ID NO: 256 - RNA, 21 nt, Artificial Sequence
  Description of Artificial Sequence: Synthetic oligonucleotide
cgggccacagucgcuucccga

SEQ ID NO: 257 - RNA, 21 nt, Artificial Sequence
  Description of Artificial Sequence: Synthetic oligonucleotide
ggaagcgacuguggcccgcac

SEQ ID NO: 258 - RNA, 21 nt, Artificial Sequence
  Description of Artificial Sequence: Synthetic oligonucleotide
gcgggccacagucgcuucccg

SEQ ID NO: 259 - RNA, 21 nt, Artificial Sequence
  Description of Artificial Sequence: Synthetic oligonucleotide
gaagcgacuguggcccgcacg

SEQ ID NO: 260 - RNA, 21 nt, Artificial Sequence
  Description of Artificial Sequence: Synthetic oligonucleotide
ugcgggccacagucgcuuccc

SEQ ID NO: 261 - RNA, 21 nt, Artificial Sequence
  Description of Artificial Sequence: Synthetic oligonucleotide
aagcgacuguggcccgcacgg

SEQ ID NO: 262 - RNA, 21 nt, Artificial Sequence
  Description of Artificial Sequence: Synthetic oligonucleotide
gugcgggccacagucgcuucc

SEQ ID NO: 263 - RNA, 21 nt, Artificial Sequence
  Description of Artificial Sequence: Synthetic oligonucleotide
agcgacuguggcccgcacggg

SEQ ID NO: 264 - RNA, 21 nt, Artificial Sequence
  Description of Artificial Sequence: Synthetic oligonucleotide
cgugcgggccacagucgcuuc

SEQ ID NO: 265 - RNA, 21 nt, Artificial Sequence
  Description of Artificial Sequence: Synthetic oligonucleotide
gcgacuguggcccgcacgggg

SEQ ID NO: 266 - RNA, 21 nt, Artificial Sequence
  Description of Artificial Sequence: Synthetic oligonucleotide
ccgugcgggccacagucgcuu

SEQ ID NO: 267 - RNA, 21 nt, Artificial Sequence
  Description of Artificial Sequence: Synthetic oligonucleotide
cgacuguggcccgcacggggc

SEQ ID NO: 268 - RNA, 21 nt, Artificial Sequence
  Description of Artificial Sequence: Synthetic oligonucleotide
cccgugcgggccacagucgcu

SEQ ID NO: 269 - RNA, 21 nt, Artificial Sequence
  Description of Artificial Sequence: Synthetic oligonucleotide
gacuguggcccgcacggggca

SEQ ID NO: 270 - RNA, 21 nt, Artificial Sequence
  Description of Artificial Sequence: Synthetic oligonucleotide
ccccgugcgggccacagucgc

SEQ ID NO: 271 - RNA, 21 nt, Artificial Sequence
  Description of Artificial Sequence: Synthetic oligonucleotide
acuguggcccgcacggggcaa

SEQ ID NO: 272 - RNA, 21 nt, Artificial Sequence
  Description of Artificial Sequence: Synthetic oligonucleotide
gccccgugcgggccacagucg

SEQ ID NO: 273 - RNA, 21 nt, Artificial Sequence
  Description of Artificial Sequence: Synthetic oligonucleotide
cuguggcccgcacggggcaag

SEQ ID NO: 274 - RNA, 21 nt, Artificial Sequence
  Description of Artificial Sequence: Synthetic oligonucleotide
ugccccgugcgggccacaguc

SEQ ID NO: 275 - RNA, 21 nt, Artificial Sequence
  Description of Artificial Sequence: Synthetic oligonucleotide
uguggcccgcacggggcaagg

SEQ ID NO: 276 - RNA, 21 nt, Artificial Sequence
  Description of Artificial Sequence: Synthetic oligonucleotide
uugccccgugcgggccacagu

SEQ ID NO: 277 - RNA, 21 nt, Artificial Sequence
  Description of Artificial Sequence: Synthetic oligonucleotide
guggcccgcacggggcaagga

SEQ ID NO: 278 - RNA, 21 nt, Artificial Sequence
  Description of Artificial Sequence: Synthetic oligonucleotide
cuugccccgugcgggccacag

SEQ ID NO: 279 - RNA, 21 nt, Artificial Sequence
  Description of Artificial Sequence: Synthetic oligonucleotide
uggcccgcacggggcaaggag

SEQ ID NO: 280 - RNA, 21 nt, Artificial Sequence
  Description of Artificial Sequence: Synthetic oligonucleotide
ccuugccccgugcgggccaca

SEQ ID NO: 281 - RNA, 21 nt, Artificial Sequence
  Description of Artificial Sequence: Synthetic oligonucleotide
ggcccgcacggggcaaggaga

SEQ ID NO: 282 - RNA, 21 nt, Artificial Sequence
  Description of Artificial Sequence: Synthetic oligonucleotide
uccuugccccgugcgggccac

SEQ ID NO: 283 - RNA, 21 nt, Artificial Sequence
  Description of Artificial Sequence: Synthetic oligonucleotide
gcccgcacggggcaaggagac

SEQ ID NO: 284 - RNA, 21 nt, Artificial Sequence
  Description of Artificial Sequence: Synthetic oligonucleotide
cuccuugccccgugcgggcca

SEQ ID NO: 285 - RNA, 21 nt, Artificial Sequence
  Description of Artificial Sequence: Synthetic oligonucleotide
cccgcacggggcaaggagaca

SEQ ID NO: 286 - RNA, 21 nt, Artificial Sequence
  Description of Artificial Sequence: Synthetic oligonucleotide
ucuccuugccccgugcgggcc

SEQ ID NO: 287 - RNA, 21 nt, Artificial Sequence
  Description of Artificial Sequence: Synthetic oligonucleotide
ccgcacggggcaaggagacag

SEQ ID NO: 288 - RNA, 21 nt, Artificial Sequence
  Description of Artificial Sequence: Synthetic oligonucleotide
gucuccuugccccgugcgggc

SEQ ID NO: 289 - RNA, 21 nt, Artificial Sequence
  Description of Artificial Sequence: Synthetic oligonucleotide
cgcacggggcaaggagacaga

SEQ ID NO: 290 - RNA, 21 nt, Artificial Sequence
  Description of Artificial Sequence: Synthetic oligonucleotide
ugucuccuugccccgugcggg

SEQ ID NO: 291 - RNA, 21 nt, Artificial Sequence
  Description of Artificial Sequence: Synthetic oligonucleotide
gcacggggcaaggagacagaa

SEQ ID NO: 292 - RNA, 21 nt, Artificial Sequence
  Description of Artificial Sequence: Synthetic oligonucleotide
cugucuccuugccccgugcgg

SEQ ID NO: 293 - RNA, 21 nt, Artificial Sequence
  Description of Artificial Sequence: Synthetic oligonucleotide
cacggggcaaggagacagaac

SEQ ID NO: 294 - RNA, 21 nt, Artificial Sequence
  Description of Artificial Sequence: Synthetic oligonucleotide
ucugucuccuugccccgugcg

SEQ ID NO: 295 - RNA, 21 nt, Artificial Sequence
  Description of Artificial Sequence: Synthetic oligonucleotide
acggggcaaggagacagaacu

SEQ ID NO: 296 - RNA, 21 nt, Artificial Sequence
  Description of Artificial Sequence: Synthetic oligonucleotide
uucugucuccuugccccgugc

SEQ ID NO: 297 - RNA, 21 nt, Artificial Sequence
  Description of Artificial Sequence: Synthetic oligonucleotide
cggggcaaggagacagaacuc

SEQ ID NO: 298 - RNA, 21 nt, Artificial Sequence
  Description of Artificial Sequence: Synthetic oligonucleotide
guucugucuccuugccccgug

SEQ ID NO: 299 - RNA, 21 nt, Artificial Sequence
  Description of Artificial Sequence: Synthetic oligonucleotide
ggggcaaggagacagaacuca

SEQ ID NO: 300 - RNA, 21 nt, Artificial Sequence
  Description of Artificial Sequence: Synthetic oligonucleotide
aguucugucuccuugccccgu

SEQ ID NO: 301 - RNA, 21 nt, Artificial Sequence
  Description of Artificial Sequence: Synthetic oligonucleotide
gggcaaggagacagaacucaa

SEQ ID NO: 302 - RNA, 21 nt, Artificial Sequence
  Description of Artificial Sequence: Synthetic oligonucleotide
gaguucugucuccuugccccg

SEQ ID NO: 303 - RNA, 21 nt, Artificial Sequence
  Description of Artificial Sequence: Synthetic oligonucleotide
ggcaaggagacagaacucaag

SEQ ID NO: 304 - RNA, 21 nt, Artificial Sequence
  Description of Artificial Sequence: Synthetic oligonucleotide
ugaguucugucuccuugcccc

SEQ ID NO: 305 - RNA, 21 nt, Artificial Sequence
  Description of Artificial Sequence: Synthetic oligonucleotide
gcaaggagacagaacucaagg

SEQ ID NO: 306 - RNA, 21 nt, Artificial Sequence
  Description of Artificial Sequence: Synthetic oligonucleotide
uugaguucugucuccuugccc

SEQ ID NO: 307 - RNA, 21 nt, Artificial Sequence
  Description of Artificial Sequence: Synthetic oligonucleotide
caaggagacagaacucaaggu

SEQ ID NO: 308 - RNA, 21 nt, Artificial Sequence
  Description of Artificial Sequence: Synthetic oligonucleotide
cuugaguucugucuccuugcc

SEQ ID NO: 309 - RNA, 21 nt, Artificial Sequence
  Description of Artificial Sequence: Synthetic oligonucleotide
aaggagacagaacucaaggug

SEQ ID NO: 310 - RNA, 21 nt, Artificial Sequence
  Description of Artificial Sequence: Synthetic oligonucleotide
ccuugaguucugucuccuugc

SEQ ID NO: 311 - RNA, 21 nt, Artificial Sequence
  Description of Artificial Sequence: Synthetic oligonucleotide
aggagacagaacucaaggugg

SEQ ID NO: 312 - RNA, 21 nt, Artificial Sequence
  Description of Artificial Sequence: Synthetic oligonucleotide
accuugaguucugucuccuug

SEQ ID NO: 313 - RNA, 21 nt, Artificial Sequence
  Description of Artificial Sequence: Synthetic oligonucleotide
ggagacagaacucaaggugga

SEQ ID NO: 314 - RNA, 21 nt, Artificial Sequence
  Description of Artificial Sequence: Synthetic oligonucleotide
caccuugaguucugucuccuu

SEQ ID NO: 315 - RNA, 21 nt, Artificial Sequence
  Description of Artificial Sequence: Synthetic oligonucleotide
gagacagaacucaagguggaa

SEQ ID NO: 316 - RNA, 21 nt, Artificial Sequence
  Description of Artificial Sequence: Synthetic oligonucleotide
ccaccuugaguucugucuccu

SEQ ID NO: 317 - RNA, 21 nt, Artificial Sequence
  Description of Artificial Sequence: Synthetic oligonucleotide
agacagaacucaagguggaag

SEQ ID NO: 318 - RNA, 21 nt, Artificial Sequence
  Description of Artificial Sequence: Synthetic oligonucleotide
uccaccuugaguucugucucc

SEQ ID NO: 319 - RNA, 21 nt, Artificial Sequence
  Description of Artificial Sequence: Synthetic oligonucleotide
gacagaacucaagguggaagu

SEQ ID NO: 320 - RNA, 21 nt, Artificial Sequence
  Description of Artificial Sequence: Synthetic oligonucleotide
uuccaccuugaguucugucuc

SEQ ID NO: 321 - RNA, 21 nt, Artificial Sequence
  Description of Artificial Sequence: Synthetic oligonucleotide
acagaacucaagguggaagua

SEQ ID NO: 322 - RNA, 21 nt, Artificial Sequence
  Description of Artificial Sequence: Synthetic oligonucleotide
cuuccaccuugaguucugucu

SEQ ID NO: 323 - RNA, 21 nt, Artificial Sequence
  Description of Artificial Sequence: Synthetic oligonucleotide
cagaacucaagguggaaguac

SEQ ID NO: 324 - RNA, 21 nt, Artificial Sequence
  Description of Artificial Sequence: Synthetic oligonucleotide
acuuccaccuugaguucuguc

SEQ ID NO: 325 - RNA, 21 nt, Artificial Sequence
  Description of Artificial Sequence: Synthetic oligonucleotide
agaacucaagguggaaguacc

SEQ ID NO: 326 - RNA, 21 nt, Artificial Sequence
  Description of Artificial Sequence: Synthetic oligonucleotide
uacuuccaccuugaguucugu

SEQ ID NO: 327 - RNA, 21 nt, Artificial Sequence
  Description of Artificial Sequence: Synthetic oligonucleotide
gaacucaagguggaaguaccg

SEQ ID NO: 328 - RNA, 21 nt, Artificial Sequence
  Description of Artificial Sequence: Synthetic oligonucleotide
guacuuccaccuugaguucug

SEQ ID NO: 329 - RNA, 21 nt, Artificial Sequence
  Description of Artificial Sequence: Synthetic oligonucleotide
aacucaagguggaaguaccgg

SEQ ID NO: 330 - RNA, 21 nt, Artificial Sequence
  Description of Artificial Sequence: Synthetic oligonucleotide
gguacuuccaccuugaguucu

SEQ ID NO: 331 - RNA, 21 nt, Artificial Sequence
  Description of Artificial Sequence: Synthetic oligonucleotide
acucaagguggaaguaccgga

SEQ ID NO: 332 - RNA, 21 nt, Artificial Sequence
  Description of Artificial Sequence: Synthetic oligonucleotide
cgguacuuccaccuugaguuc

SEQ ID NO: 333 - RNA, 21 nt, Artificial Sequence
  Description of Artificial Sequence: Synthetic oligonucleotide
cucaagguggaaguaccggag

SEQ ID NO: 334 - RNA, 21 nt, Artificial Sequence
  Description of Artificial Sequence: Synthetic oligonucleotide
ccgguacuuccaccuugaguu

SEQ ID NO: 335 - RNA, 21 nt, Artificial Sequence
  Description of Artificial Sequence: Synthetic oligonucleotide
ucaagguggaaguaccggagu

SEQ ID NO: 336 - RNA, 21 nt, Artificial Sequence
  Description of Artificial Sequence: Synthetic oligonucleotide
uccgguacuuccaccuugagu

SEQ ID NO: 337 - RNA, 21 nt, Artificial Sequence
  Description of Artificial Sequence: Synthetic oligonucleotide
caagguggaaguaccggagua

SEQ ID NO: 338 - RNA, 21 nt, Artificial Sequence
  Description of Artificial Sequence: Synthetic oligonucleotide
cuccgguacuuccaccuugag

SEQ ID NO: 339 - RNA, 21 nt, Artificial Sequence
  Description of Artificial Sequence: Synthetic oligonucleotide
aagguggaaguaccggaguau

SEQ ID NO: 340 - RNA, 21 nt, Artificial Sequence
  Description of Artificial Sequence: Synthetic oligonucleotide
acuccgguacuuccaccuuga

SEQ ID NO: 341 - RNA, 21 nt, Artificial Sequence
  Description of Artificial Sequence: Synthetic oligonucleotide
agguggaaguaccggaguauc

SEQ ID NO: 342 - RNA, 21 nt, Artificial Sequence
  Description of Artificial Sequence: Synthetic oligonucleotide
uacuccgguacuuccaccuug

SEQ ID NO: 343 - RNA, 21 nt, Artificial Sequence
  Description of Artificial Sequence: Synthetic oligonucleotide
gguggaaguaccggaguaucu

SEQ ID NO: 344 - RNA, 21 nt, Artificial Sequence
  Description of Artificial Sequence: Synthetic oligonucleotide
auacuccgguacuuccaccuu

SEQ ID NO: 345 - RNA, 21 nt, Artificial Sequence
  Description of Artificial Sequence: Synthetic oligonucleotide
guggaaguaccggaguaucug

SEQ ID NO: 346 - RNA, 21 nt, Artificial Sequence
  Description of Artificial Sequence: Synthetic oligonucleotide
gauacuccgguacuuccaccu

SEQ ID NO: 347 - RNA, 21 nt, Artificial Sequence
  Description of Artificial Sequence: Synthetic oligonucleotide
uggaaguaccggaguaucugg

SEQ ID NO: 348 - RNA, 21 nt, Artificial Sequence
  Description of Artificial Sequence: Synthetic oligonucleotide
agauacuccgguacuuccacc

SEQ ID NO: 349 - RNA, 21 nt, Artificial Sequence
  Description of Artificial Sequence: Synthetic oligonucleotide
ggaaguaccggaguaucuggg

SEQ ID NO: 350 - RNA, 21 nt, Artificial Sequence
  Description of Artificial Sequence: Synthetic oligonucleotide
cagauacuccgguacuuccac

SEQ ID NO: 351 - RNA, 21 nt, Artificial Sequence
  Description of Artificial Sequence: Synthetic oligonucleotide
gaaguaccggaguaucugggg

SEQ ID NO: 352 - RNA, 21 nt, Artificial Sequence
  Description of Artificial Sequence: Synthetic oligonucleotide
ccagauacuccgguacuucca

SEQ ID NO: 353 - RNA, 21 nt, Artificial Sequence
  Description of Artificial Sequence: Synthetic oligonucleotide
aaguaccggaguaucuggggc

SEQ ID NO: 354 - RNA, 21 nt, Artificial Sequence
  Description of Artificial Sequence: Synthetic oligonucleotide
cccagauacuccgguacuucc

SEQ ID NO: 355 - RNA, 21 nt, Artificial Sequence
  Description of Artificial Sequence: Synthetic oligonucleotide
aguaccggaguaucuggggcc

SEQ ID NO: 356 - RNA, 21 nt, Artificial Sequence
  Description of Artificial Sequence: Synthetic oligonucleotide
ccccagauacuccgguacuuc

SEQ ID NO: 357 - RNA, 21 nt, Artificial Sequence
  Description of Artificial Sequence: Synthetic oligonucleotide
guaccggaguaucuggggccg

SEQ ID NO: 358 - RNA, 21 nt, Artificial Sequence
  Description of Artificial Sequence: Synthetic oligonucleotide
gccccagauacuccgguacuu

SEQ ID NO: 359 - RNA, 21 nt, Artificial Sequence
  Description of Artificial Sequence: Synthetic oligonucleotide
uaccggaguaucuggggccgc

SEQ ID NO: 360 - RNA, 21 nt, Artificial Sequence
  Description of Artificial Sequence: Synthetic oligonucleotide
ggccccagauacuccgguacu

SEQ ID NO: 361 - RNA, 21 nt, Artificial Sequence
  Description of Artificial Sequence: Synthetic oligonucleotide
accggaguaucuggggccgcu

SEQ ID NO: 362 - RNA, 21 nt, Artificial Sequence
  Description of Artificial Sequence: Synthetic oligonucleotide
cggccccagauacuccgguac

SEQ ID NO: 363 - RNA, 21 nt, Artificial Sequence
  Description of Artificial Sequence: Synthetic oligonucleotide
ccggaguaucuggggccgcug

SEQ ID NO: 364 - RNA, 21 nt, Artificial Sequence
  Description of Artificial Sequence: Synthetic oligonucleotide
gcggccccagauacuccggua

SEQ ID NO: 365 - RNA, 21 nt, Artificial Sequence
  Description of Artificial Sequence: Synthetic oligonucleotide
cggaguaucuggggccgcugc

SEQ ID NO: 366 - RNA, 21 nt, Artificial Sequence
  Description of Artificial Sequence: Synthetic oligonucleotide
agcggccccagauacuccggu

SEQ ID NO: 367 - RNA, 21 nt, Artificial Sequence
  Description of Artificial Sequence: Synthetic oligonucleotide
ggaguaucuggggccgcugcu

SEQ ID NO: 368 - RNA, 21 nt, Artificial Sequence
  Description of Artificial Sequence: Synthetic oligonucleotide
cagcggccccagauacuccgg

SEQ ID NO: 369 - RNA, 21 nt, Artificial Sequence
  Description of Artificial Sequence: Synthetic oligonucleotide
gaguaucuggggccgcugcug

SEQ ID NO: 370 - RNA, 21 nt, Artificial Sequence
  Description of Artificial Sequence: Synthetic oligonucleotide
gcagcggccccagauacuccg

SEQ ID NO: 371 - RNA, 21 nt, Artificial Sequence
  Description of Artificial Sequence: Synthetic oligonucleotide
aguaucuggggccgcugcugu

SEQ ID NO: 372 - RNA, 21 nt, Artificial Sequence
  Description of Artificial Sequence: Synthetic oligonucleotide
agcagcggccccagauacucc

SEQ ID NO: 373 - RNA, 21 nt, Artificial Sequence
  Description of Artificial Sequence: Synthetic oligonucleotide
guaucuggggccgcugcuguu

SEQ ID NO: 374 - RNA, 21 nt, Artificial Sequence
  Description of Artificial Sequence: Synthetic oligonucleotide
cagcagcggccccagauacuc

SEQ ID NO: 375 - RNA, 21 nt, Artificial Sequence
  Description of Artificial Sequence: Synthetic oligonucleotide
uaucuggggccgcugcuguuu

SEQ ID NO: 376 - RNA, 21 nt, Artificial Sequence
  Description of Artificial Sequence: Synthetic oligonucleotide
acagcagcggccccagauacu

SEQ ID NO: 377 - RNA, 21 nt, Artificial Sequence
  Description of Artificial Sequence: Synthetic oligonucleotide
aucuggggccgcugcuguuug

SEQ ID NO: 378 - RNA, 21 nt, Artificial Sequence
  Description of Artificial Sequence: Synthetic oligonucleotide
aacagcagcggccccagauac

SEQ ID NO: 379 - RNA, 21 nt, Artificial Sequence
  Description of Artificial Sequence: Synthetic oligonucleotide
ucuggggccgcugcuguuugu

SEQ ID NO: 380 - RNA, 21 nt, Artificial Sequence
  Description of Artificial Sequence: Synthetic oligonucleotide
aaacagcagcggccccagaua

SEQ ID NO: 381 - RNA, 21 nt, Artificial Sequence
  Description of Artificial Sequence: Synthetic oligonucleotide
cuggggccgcugcuguuugug

SEQ ID NO: 382 - RNA, 21 nt, Artificial Sequence
  Description of Artificial Sequence: Synthetic oligonucleotide
caaacagcagcggccccagau

SEQ ID NO: 383 - RNA, 21 nt, Artificial Sequence
  Description of Artificial Sequence: Synthetic oligonucleotide
uggggccgcugcuguuuguga

SEQ ID NO: 384 - RNA, 21 nt, Artificial Sequence
  Description of Artificial Sequence: Synthetic oligonucleotide
acaaacagcagcggccccaga

SEQ ID NO: 385 - RNA, 21 nt, Artificial Sequence
  Description of Artificial Sequence: Synthetic oligonucleotide
ggggccgcugcuguuugugaa

SEQ ID NO: 386 - RNA, 21 nt, Artificial Sequence
  Description of Artificial Sequence: Synthetic oligonucleotide
cacaaacagcagcggccccag

SEQ ID NO: 387 - RNA, 21 nt, Artificial Sequence
  Description of Artificial Sequence: Synthetic oligonucleotide
gggccgcugcuguuugugaaa

SEQ ID NO: 388 - RNA, 21 nt, Artificial Sequence
  Description of Artificial Sequence: Synthetic oligonucleotide
ucacaaacagcagcggcccca

SEQ ID NO: 389 - RNA, 21 nt, Artificial Sequence
  Description of Artificial Sequence: Synthetic oligonucleotide
ggccgcugcuguuugugaaac

SEQ ID NO: 390 - RNA, 21 nt, Artificial Sequence
  Description of Artificial Sequence: Synthetic oligonucleotide
uucacaaacagcagcggcccc

SEQ ID NO: 391 - RNA, 21 nt, Artificial Sequence
  Description of Artificial Sequence: Synthetic oligonucleotide
gccgcugcuguuugugaaacu

SEQ ID NO: 392 - RNA, 21 nt, Artificial Sequence
  Description of Artificial Sequence: Synthetic oligonucleotide
uuucacaaacagcagcggccc

SEQ ID NO: 393 - RNA, 21 nt, Artificial Sequence
  Description of Artificial Sequence: Synthetic oligonucleotide
ccgcugcuguuugugaaacug

SEQ ID NO: 394 - RNA, 21 nt, Artificial Sequence
  Description of Artificial Sequence: Synthetic oligonucleotide
guuucacaaacagcagcggcc

SEQ ID NO: 395 - RNA, 21 nt, Artificial Sequence
  Description of Artificial Sequence: Synthetic oligonucleotide
cgcugcuguuugugaaacugc

SEQ ID NO: 396 - RNA, 21 nt, Artificial Sequence
  Description of Artificial Sequence: Synthetic oligonucleotide
aguuucacaaacagcagcggc

SEQ ID NO: 397 - RNA, 21 nt, Artificial Sequence
  Description of Artificial Sequence: Synthetic oligonucleotide
gcugcuguuugugaaacugcg

SEQ ID NO: 398 - RNA, 21 nt, Artificial Sequence
  Description of Artificial Sequence: Synthetic oligonucleotide
caguuucacaaacagcagcgg

SEQ ID NO: 399 - RNA, 21 nt, Artificial Sequence
  Description of Artificial Sequence: Synthetic oligonucleotide
cugcuguuugugaaacugcgc

SEQ ID NO: 400 - RNA, 21 nt, Artificial Sequence
  Description of Artificial Sequence: Synthetic oligonucleotide
gcaguuucacaaacagcagcg

SEQ ID NO: 401 - RNA, 21 nt, Artificial Sequence
  Description of Artificial Sequence: Synthetic oligonucleotide
ugcuguuugugaaacugcgca

SEQ ID NO: 402 - RNA, 21 nt, Artificial Sequence
  Description of Artificial Sequence: Synthetic oligonucleotide
cgcaguuucacaaacagcagc

SEQ ID NO: 403 - RNA, 21 nt, Artificial Sequence
  Description of Artificial Sequence: Synthetic oligonucleotide
gcuguuugugaaacugcgcaa

SEQ ID NO: 404 - RNA, 21 nt, Artificial Sequence
  Description of Artificial Sequence: Synthetic oligonucleotide
gcgcaguuucacaaacagcag

SEQ ID NO: 405 - RNA, 21 nt, Artificial Sequence
  Description of Artificial Sequence: Synthetic oligonucleotide
cuguuugugaaacugcgcaaa

SEQ ID NO: 406 - RNA, 21 nt, Artificial Sequence
  Description of Artificial Sequence: Synthetic oligonucleotide
ugcgcaguuucacaaacagca

SEQ ID NO: 407 - RNA, 21 nt, Artificial Sequence
  Description of Artificial Sequence: Synthetic oligonucleotide
uguuugugaaacugcgcaaac

SEQ ID NO: 408 - RNA, 21 nt, Artificial Sequence
  Description of Artificial Sequence: Synthetic oligonucleotide
uugcgcaguuucacaaacagc

SEQ ID NO: 409 - RNA, 21 nt, Artificial Sequence
  Description of Artificial Sequence: Synthetic oligonucleotide
guuugugaaacugcgcaaacg

SEQ ID NO: 410 - RNA, 21 nt, Artificial Sequence
  Description of Artificial Sequence: Synthetic oligonucleotide
uuugcgcaguuucacaaacag

SEQ ID NO: 411 - RNA, 21 nt, Artificial Sequence
  Description of Artificial Sequence: Synthetic oligonucleotide
uuugugaaacugcgcaaacgg

SEQ ID NO: 412 - RNA, 21 nt, Artificial Sequence
  Description of Artificial Sequence: Synthetic oligonucleotide
guuugcgcaguuucacaaaca

SEQ ID NO: 413 - RNA, 21 nt, Artificial Sequence
  Description of Artificial Sequence: Synthetic oligonucleotide
uugugaaacugcgcaaacggc

SEQ ID NO: 414 - RNA, 21 nt, Artificial Sequence
  Description of Artificial Sequence: Synthetic oligonucleotide
cguuugcgcaguuucacaaac

SEQ ID NO: 415 - RNA, 21 nt, Artificial Sequence
  Description of Artificial Sequence: Synthetic oligonucleotide
ugugaaacugcgcaaacggca

SEQ ID NO: 416 - RNA, 21 nt, Artificial Sequence
  Description of Artificial Sequence: Synthetic oligonucleotide
ccguuugcgcaguuucacaaa

SEQ ID NO: 417 - RNA, 21 nt, Artificial Sequence
  Description of Artificial Sequence: Synthetic oligonucleotide
gugaaacugcgcaaacggcac

SEQ ID NO: 418 - RNA, 21 nt, Artificial Sequence
  Description of Artificial Sequence: Synthetic oligonucleotide
gccguuugcgcaguuucacaa

SEQ ID NO: 419 - RNA, 21 nt, Artificial Sequence
  Description of Artificial Sequence: Synthetic oligonucleotide
ugaaacugcgcaaacggcacc

SEQ ID NO: 420 - RNA, 21 nt, Artificial Sequence
  Description of Artificial Sequence: Synthetic oligonucleotide
ugccguuugcgcaguuucaca

SEQ ID NO: 421 - RNA, 21 nt, Artificial Sequence
  Description of Artificial Sequence: Synthetic oligonucleotide
gaaacugcgcaaacggcaccu

SEQ ID NO: 422 - RNA, 21 nt, Artificial Sequence
  Description of Artificial Sequence: Synthetic oligonucleotide
gugccguuugcgcaguuucac

SEQ ID NO: 423 - RNA, 21 nt, Artificial Sequence
  Description of Artificial Sequence: Synthetic oligonucleotide
aaacugcgcaaacggcaccuc

SEQ ID NO: 424 - RNA, 21 nt, Artificial Sequence
  Description of Artificial Sequence: Synthetic oligonucleotide
ggugccguuugcgcaguuuca

SEQ ID NO: 425 - RNA, 21 nt, Artificial Sequence
  Description of Artificial Sequence: Synthetic oligonucleotide
aacugcgcaaacggcaccucc

SEQ ID NO: 426 - RNA, 21 nt, Artificial Sequence
  Description of Artificial Sequence: Synthetic oligonucleotide
aggugccguuugcgcaguuuc

SEQ ID NO: 427 - RNA, 21 nt, Artificial Sequence
  Description of Artificial Sequence: Synthetic oligonucleotide
acugcgcaaacggcaccuccu

SEQ ID NO: 428 - RNA, 21 nt, Artificial Sequence
  Description of Artificial Sequence: Synthetic oligonucleotide
gaggugccguuugcgcaguuu

SEQ ID NO: 429 - RNA, 21 nt, Artificial Sequence
  Description of Artificial Sequence: Synthetic oligonucleotide
cugcgcaaacggcaccuccuu

SEQ ID NO: 430 - RNA, 21 nt, Artificial Sequence
  Description of Artificial Sequence: Synthetic oligonucleotide
ggaggugccguuugcgcaguu

SEQ ID NO: 431 - RNA, 21 nt, Artificial Sequence
  Description of Artificial Sequence: Synthetic oligonucleotide
ugcgcaaacggcaccuccuua

SEQ ID NO: 432 - RNA, 21 nt, Artificial Sequence
  Description of Artificial Sequence: Synthetic oligonucleotide
aggaggugccguuugcgcagu

SEQ ID NO: 433 - RNA, 21 nt, Artificial Sequence
  Description of Artificial Sequence: Synthetic oligonucleotide
gcgcaaacggcaccuccuuaa

SEQ ID NO: 434 - RNA, 21 nt, Artificial Sequence
  Description of Artificial Sequence: Synthetic oligonucleotide
aaggaggugccguuugcgcag

SEQ ID NO: 435 - RNA, 21 nt, Artificial Sequence
  Description of Artificial Sequence: Synthetic oligonucleotide
cgcaaacggcaccuccuuaag

SEQ ID NO: 436 - RNA, 21 nt, Artificial Sequence
  Description of Artificial Sequence: Synthetic oligonucleotide
uaaggaggugccguuugcgca

SEQ ID NO: 437 - RNA, 21 nt, Artificial Sequence
  Description of Artificial Sequence: Synthetic oligonucleotide
gcaaacggcaccuccuuaagg

SEQ ID NO: 438 - RNA, 21 nt, Artificial Sequence
  Description of Artificial Sequence: Synthetic oligonucleotide
uuaaggaggugccguuugcgc

SEQ ID NO: 439 - RNA, 21 nt, Artificial Sequence
  Description of Artificial Sequence: Synthetic oligonucleotide
caaacggcaccuccuuaagga

SEQ ID NO: 440 - RNA, 21 nt, Artificial Sequence
  Description of Artificial Sequence: Synthetic oligonucleotide
cuuaaggaggugccguuugcg

SEQ ID NO: 441 - RNA, 21 nt, Artificial Sequence
  Description of Artificial Sequence: Synthetic oligonucleotide
aaacggcaccuccuuaaggac

SEQ ID NO: 442 - RNA, 21 nt, Artificial Sequence
  Description of Artificial Sequence: Synthetic oligonucleotide
ccuuaaggaggugccguuugc

SEQ ID NO: 443 - RNA, 21 nt, Artificial Sequence
  Description of Artificial Sequence: Synthetic oligonucleotide
aacggcaccuccuuaaggacg

SEQ ID NO: 444 - RNA, 21 nt, Artificial Sequence
  Description of Artificial Sequence: Synthetic oligonucleotide
uccuuaaggaggugccguuug

SEQ ID NO: 445 - RNA, 21 nt, Artificial Sequence
  Description of Artificial Sequence: Synthetic oligonucleotide
acggcaccuccuuaaggacga

SEQ ID NO: 446 - RNA, 21 nt, Artificial Sequence
  Description of Artificial Sequence: Synthetic oligonucleotide
guccuuaaggaggugccguuu

SEQ ID NO: 447 - RNA, 21 nt, Artificial Sequence
  Description of Artificial Sequence: Synthetic oligonucleotide
cggcaccuccuuaaggacgac

SEQ ID NO: 448 - RNA, 21 nt, Artificial Sequence
  Description of Artificial Sequence: Synthetic oligonucleotide
cguccuuaaggaggugccguu

SEQ ID NO: 449 - RNA, 21 nt, Artificial Sequence
  Description of Artificial Sequence: Synthetic oligonucleotide
ggcaccuccuuaaggacgacg

SEQ ID NO: 450 - RNA, 21 nt, Artificial Sequence
  Description of Artificial Sequence: Synthetic oligonucleotide
ucguccuuaaggaggugccgu

SEQ ID NO: 451 - RNA, 21 nt, Artificial Sequence
  Description of Artificial Sequence: Synthetic oligonucleotide
gcaccuccuuaaggacgacgc

SEQ ID NO: 452 - RNA, 21 nt, Artificial Sequence
  Description of Artificial Sequence: Synthetic oligonucleotide
gucguccuuaaggaggugccg

SEQ ID NO: 453 - RNA, 21 nt, Artificial Sequence
  Description of Artificial Sequence: Synthetic oligonucleotide
caccuccuuaaggacgacgcc

SEQ ID NO: 454 - RNA, 21 nt, Artificial Sequence
  Description of Artificial Sequence: Synthetic oligonucleotide
cgucguccuuaaggaggugcc

SEQ ID NO: 455 - RNA, 21 nt, Artificial Sequence
  Description of Artificial Sequence: Synthetic oligonucleotide
accuccuuaaggacgacgccu

SEQ ID NO: 456 - RNA, 21 nt, Artificial Sequence
  Description of Artificial Sequence: Synthetic oligonucleotide
gcgucguccuuaaggaggugc

SEQ ID NO: 457 - RNA, 21 nt, Artificial Sequence
  Description of Artificial Sequence: Synthetic oligonucleotide
ccuccuuaaggacgacgccug

SEQ ID NO: 458 - RNA, 21 nt, Artificial Sequence
  Description of Artificial Sequence: Synthetic oligonucleotide
ggcgucguccuuaaggaggug

SEQ ID NO: 459 - RNA, 21 nt, Artificial Sequence
  Description of Artificial Sequence: Synthetic oligonucleotide
cuccuuaaggacgacgccugg

SEQ ID NO: 460 - RNA, 21 nt, Artificial Sequence
  Description of Artificial Sequence: Synthetic oligonucleotide
aggcgucguccuuaaggaggu

SEQ ID NO: 461 - RNA, 21 nt, Artificial Sequence
  Description of Artificial Sequence: Synthetic oligonucleotide
uccuuaaggacgacgccuggu

SEQ ID NO: 462 - RNA, 21 nt, Artificial Sequence
  Description of Artificial Sequence: Synthetic oligonucleotide
caggcgucguccuuaaggagg

SEQ ID NO: 463 - RNA, 21 nt, Artificial Sequence
  Description of Artificial Sequence: Synthetic oligonucleotide
ccuuaaggacgacgccugguu

SEQ ID NO: 464 - RNA, 21 nt, Artificial Sequence
  Description of Artificial Sequence: Synthetic oligonucleotide
ccaggcgucguccuuaaggag

SEQ ID NO: 465 - RNA, 21 nt, Artificial Sequence
  Description of Artificial Sequence: Synthetic oligonucleotide
cuuaaggacgacgccugguuc

SEQ ID NO: 466 - RNA, 21 nt, Artificial Sequence
  Description of Artificial Sequence: Synthetic oligonucleotide
accaggcgucguccuuaagga

SEQ ID NO: 467 - RNA, 21 nt, Artificial Sequence
  Description of Artificial Sequence: Synthetic oligonucleotide
uuaaggacgacgccugguucu

SEQ ID NO: 468 - RNA, 21 nt, Artificial Sequence
  Description of Artificial Sequence: Synthetic oligonucleotide
aaccaggcgucguccuuaagg

SEQ ID NO: 469 - RNA, 21 nt, Artificial Sequence
  Description of Artificial Sequence: Synthetic oligonucleotide
uaaggacgacgccugguucug

SEQ ID NO: 470 - RNA, 21 nt, Artificial Sequence
  Description of Artificial Sequence: Synthetic oligonucleotide
gaaccaggcgucguccuuaag

SEQ ID NO: 471 - RNA, 21 nt, Artificial Sequence
  Description of Artificial Sequence: Synthetic oligonucleotide
aaggacgacgccugguucugc

SEQ ID NO: 472 - RNA, 21 nt, Artificial Sequence
  Description of Artificial Sequence: Synthetic oligonucleotide
agaaccaggcgucguccuuaa

SEQ ID NO: 473 - RNA, 21 nt, Artificial Sequence
  Description of Artificial Sequence: Synthetic oligonucleotide
aggacgacgccugguucugca

SEQ ID NO: 474 - RNA, 21 nt, Artificial Sequence
  Description of Artificial Sequence: Synthetic oligonucleotide
cagaaccaggcgucguccuua

SEQ ID NO: 475 - RNA, 21 nt, Artificial Sequence
  Description of Artificial Sequence: Synthetic oligonucleotide
ggacgacgccugguucugcaa

SEQ ID NO: 476 - RNA, 21 nt, Artificial Sequence
  Description of Artificial Sequence: Synthetic oligonucleotide
gcagaaccaggcgucguccuu

SEQ ID NO: 477 - RNA, 21 nt, Artificial Sequence
  Description of Artificial Sequence: Synthetic oligonucleotide
gacgacgccugguucugcaac

SEQ ID NO: 478 - RNA, 21 nt, Artificial Sequence
  Description of Artificial Sequence: Synthetic oligonucleotide
ugcagaaccaggcgucguccu

SEQ ID NO: 479 - RNA, 21 nt, Artificial Sequence
  Description of Artificial Sequence: Synthetic oligonucleotide
acgacgccugguucugcaacu

SEQ ID NO: 480 - RNA, 21 nt, Artificial Sequence
  Description of Artificial Sequence: Synthetic oligonucleotide
uugcagaaccaggcgucgucc

SEQ ID NO: 481 - RNA, 21 nt, Artificial Sequence
  Description of Artificial Sequence: Synthetic oligonucleotide
cgacgccugguucugcaacug

SEQ ID NO: 482 - RNA, 21 nt, Artificial Sequence
  Description of Artificial Sequence: Synthetic oligonucleotide
guugcagaaccaggcgucguc

SEQ ID NO: 483 - RNA, 21 nt, Artificial Sequence
  Description of Artificial Sequence: Synthetic oligonucleotide
gacgccugguucugcaacugg

SEQ ID NO: 484 - RNA, 21 nt, Artificial Sequence
  Description of Artificial Sequence: Synthetic oligonucleotide
aguugcagaaccaggcgucgu

SEQ ID NO: 485 - RNA, 21 nt, Artificial Sequence
  Description of Artificial Sequence: Synthetic oligonucleotide
acgccugguucugcaacugga

SEQ ID NO: 486 - RNA, 21 nt, Artificial Sequence
  Description of Artificial Sequence: Synthetic oligonucleotide
caguugcagaaccaggcgucg

SEQ ID NO: 487 - RNA, 21 nt, Artificial Sequence
  Description of Artificial Sequence: Synthetic oligonucleotide
cgccugguucugcaacuggau

SEQ ID NO: 488 - RNA, 21 nt, Artificial Sequence
  Description of Artificial Sequence: Synthetic oligonucleotide
ccaguugcagaaccaggcguc

SEQ ID NO: 489 - RNA, 21 nt, Artificial Sequence
  Description of Artificial Sequence: Synthetic oligonucleotide
gccugguucugcaacuggauc

SEQ ID NO: 490 - RNA, 21 nt, Artificial Sequence
  Description of Artificial Sequence: Synthetic oligonucleotide
uccaguugcagaaccaggcgu

SEQ ID NO: 491 - RNA, 21 nt, Artificial Sequence
  Description of Artificial Sequence: Synthetic oligonucleotide
ccugguucugcaacuggaucu

SEQ ID NO: 492 - RNA, 21 nt, Artificial Sequence
  Description of Artificial Sequence: Synthetic oligonucleotide
auccaguugcagaaccaggcg

SEQ ID NO: 493 - RNA, 21 nt, Artificial Sequence
  Description of Artificial Sequence: Synthetic oligonucleotide
cugguucugcaacuggaucuc

SEQ ID NO: 494 - RNA, 21 nt, Artificial Sequence
  Description of Artificial Sequence: Synthetic oligonucleotide
gauccaguugcagaaccaggc

SEQ ID NO: 495 - RNA, 21 nt, Artificial Sequence
  Description of Artificial Sequence: Synthetic oligonucleotide
ugguucugcaacuggaucucu

SEQ ID NO: 496 - RNA, 21 nt, Artificial Sequence
  Description of Artificial Sequence: Synthetic oligonucleotide
agauccaguugcagaaccagg

SEQ ID NO: 497 - RNA, 21 nt, Artificial Sequence
  Description of Artificial Sequence: Synthetic oligonucleotide
gguucugcaacuggaucucug

SEQ ID NO: 498 - RNA, 21 nt, Artificial Sequence
  Description of Artificial Sequence: Synthetic oligonucleotide
gagauccaguugcagaaccag

SEQ ID NO: 499 - RNA, 21 nt, Artificial Sequence
  Description of Artificial Sequence: Synthetic oligonucleotide
guucugcaacuggaucucugu

SEQ ID NO: 500 - RNA, 21 nt, Artificial Sequence
  Description of Artificial Sequence: Synthetic oligonucleotide
agagauccaguugcagaacca

SEQ ID NO: 501 - RNA, 21 nt, Artificial Sequence
  Description of Artificial Sequence: Synthetic oligonucleotide
uucugcaacuggaucucugug

SEQ ID NO: 502 - RNA, 21 nt, Artificial Sequence
  Description of Artificial Sequence: Synthetic oligonucleotide
cagagauccaguugcagaacc

SEQ ID NO: 503 - RNA, 21 nt, Artificial Sequence
  Description of Artificial Sequence: Synthetic oligonucleotide
ucugcaacuggaucucugugc

SEQ ID NO: 504 - RNA, 21 nt, Artificial Sequence
  Description of Artificial Sequence: Synthetic oligonucleotide
acagagauccaguugcagaac

SEQ ID NO: 505 - RNA, 21 nt, Artificial Sequence
  Description of Artificial Sequence: Synthetic oligonucleotide
cugcaacuggaucucugugca

SEQ ID NO: 506 - RNA, 21 nt, Artificial Sequence
  Description of Artificial Sequence: Synthetic oligonucleotide
cacagagauccaguugcagaa

SEQ ID NO: 507 - RNA, 21 nt, Artificial Sequence
  Description of Artificial Sequence: Synthetic oligonucleotide
ugcaacuggaucucugugcag

SEQ ID NO: 508 - RNA, 21 nt, Artificial Sequence
  Description of Artificial Sequence: Synthetic oligonucleotide
gcacagagauccaguugcaga

SEQ ID NO: 509 - RNA, 21 nt, Artificial Sequence
  Description of Artificial Sequence: Synthetic oligonucleotide
gcaacuggaucucugugcagg

SEQ ID NO: 510 - RNA, 21 nt, Artificial Sequence
  Description of Artificial Sequence: Synthetic oligonucleotide
ugcacagagauccaguugcag

SEQ ID NO: 511 - RNA, 21 nt, Artificial Sequence
  Description of Artificial Sequence: Synthetic oligonucleotide
caacuggaucucugugcaggg

SEQ ID NO: 512 - RNA, 21 nt, Artificial Sequence
  Description of Artificial Sequence: Synthetic oligonucleotide
cugcacagagauccaguugca

SEQ ID NO: 513 - RNA, 21 nt, Artificial Sequence
  Description of Artificial Sequence: Synthetic oligonucleotide
aacuggaucucugugcagggc

SEQ ID NO: 514 - RNA, 21 nt, Artificial Sequence
  Description of Artificial Sequence: Synthetic oligonucleotide
ccugcacagagauccaguugc

SEQ ID NO: 515 - RNA, 21 nt, Artificial Sequence
  Description of Artificial Sequence: Synthetic oligonucleotide
acuggaucucugugcagggcc

SEQ ID NO: 516 - RNA, 21 nt, Artificial Sequence
  Description of Artificial Sequence: Synthetic oligonucleotide
cccugcacagagauccaguug

SEQ ID NO: 517 - RNA, 21 nt, Artificial Sequence
  Description of Artificial Sequence: Synthetic oligonucleotide
cuggaucucugugcagggccc

SEQ ID NO: 518 - RNA, 21 nt, Artificial Sequence
  Description of Artificial Sequence: Synthetic oligonucleotide
gcccugcacagagauccaguu

SEQ ID NO: 519 - RNA, 21 nt, Artificial Sequence
  Description of Artificial Sequence: Synthetic oligonucleotide
uggaucucugugcagggcccc

SEQ ID NO: 520 - RNA, 21 nt, Artificial Sequence
  Description of Artificial Sequence: Synthetic oligonucleotide
ggcccugcacagagauccagu

SEQ ID NO: 521 - RNA, 21 nt, Artificial Sequence
  Description of Artificial Sequence: Synthetic oligonucleotide
ggaucucugugcagggccccg

SEQ ID NO: 522 - RNA, 21 nt, Artificial Sequence
  Description of Artificial Sequence: Synthetic oligonucleotide
gggcccugcacagagauccag

SEQ ID NO: 523 - RNA, 21 nt, Artificial Sequence
  Description of Artificial Sequence: Synthetic oligonucleotide
gaucucugugcagggccccgg

SEQ ID NO: 524 - RNA, 21 nt, Artificial Sequence
  Description of Artificial Sequence: Synthetic oligonucleotide
ggggcccugcacagagaucca

SEQ ID NO: 525 - RNA, 21 nt, Artificial Sequence
  Description of Artificial Sequence: Synthetic oligonucleotide
aucucugugcagggccccgga

SEQ ID NO: 526 - RNA, 21 nt, Artificial Sequence
  Description of Artificial Sequence: Synthetic oligonucleotide
cggggcccugcacagagaucc

SEQ ID NO: 527 - RNA, 21 nt, Artificial Sequence
  Description of Artificial Sequence: Synthetic oligonucleotide
ucucugugcagggccccggag

SEQ ID NO: 528 - RNA, 21 nt, Artificial Sequence
  Description of Artificial Sequence: Synthetic oligonucleotide
ccggggcccugcacagagauc

SEQ ID NO: 529 - RNA, 21 nt, Artificial Sequence
  Description of Artificial Sequence: Synthetic oligonucleotide
cucugugcagggccccggagc

SEQ ID NO: 530 - RNA, 21 nt, Artificial Sequence
  Description of Artificial Sequence: Synthetic oligonucleotide
uccggggcccugcacagagau

SEQ ID NO: 531 - RNA, 21 nt, Artificial Sequence
  Description of Artificial Sequence: Synthetic oligonucleotide
ucugugcagggccccggagcc

SEQ ID NO: 532 - RNA, 21 nt, Artificial Sequence
  Description of Artificial Sequence: Synthetic oligonucleotide
cuccggggcccugcacagaga

SEQ ID NO: 533 - RNA, 21 nt, Artificial Sequence
  Description of Artificial Sequence: Synthetic oligonucleotide
cugugcagggccccggagccg

SEQ ID NO: 534 - RNA, 21 nt, Artificial Sequence
  Description of Artificial Sequence: Synthetic oligonucleotide
gcuccggggcccugcacagag

SEQ ID NO: 535 - RNA, 21 nt, Artificial Sequence
  Description of Artificial Sequence: Synthetic oligonucleotide
ugugcagggccccggagccgg

SEQ ID NO: 536 - RNA, 21 nt, Artificial Sequence
  Description of Artificial Sequence: Synthetic oligonucleotide
ggcuccggggcccugcacaga

SEQ ID NO: 537 - RNA, 21 nt, Artificial Sequence
  Description of Artificial Sequence: Synthetic oligonucleotide
gugcagggccccggagccggg

SEQ ID NO: 538 - RNA, 21 nt, Artificial Sequence
  Description of Artificial Sequence: Synthetic oligonucleotide
cggcuccggggcccugcacag

SEQ ID NO: 539 - RNA, 21 nt, Artificial Sequence
  Description of Artificial Sequence: Synthetic oligonucleotide
ugcagggccccggagccgggg

SEQ ID NO: 540 - RNA, 21 nt, Artificial Sequence
  Description of Artificial Sequence: Synthetic oligonucleotide
ccggcuccggggcccugcaca

SEQ ID NO: 541 - RNA, 21 nt, Artificial Sequence
  Description of Artificial Sequence: Synthetic oligonucleotide
gcagggccccggagccgggga

SEQ ID NO: 542 - RNA, 21 nt, Artificial Sequence
  Description of Artificial Sequence: Synthetic oligonucleotide
cccggcuccggggcccugcac

SEQ ID NO: 543 - RNA, 21 nt, Artificial Sequence
  Description of Artificial Sequence: Synthetic oligonucleotide
cagggccccggagccggggac

SEQ ID NO: 544 - RNA, 21 nt, Artificial Sequence
  Description of Artificial Sequence: Synthetic oligonucleotide
ccccggcuccggggcccugca

SEQ ID NO: 545 - RNA, 21 nt, Artificial Sequence
  Description of Artificial Sequence: Synthetic oligonucleotide
agggccccggagccggggacg

SEQ ID NO: 546 - RNA, 21 nt, Artificial Sequence
  Description of Artificial Sequence: Synthetic oligonucleotide
uccccggcuccggggcccugc

SEQ ID NO: 547 - RNA, 21 nt, Artificial Sequence
  Description of Artificial Sequence: Synthetic oligonucleotide
gggccccggagccggggacga

SEQ ID NO: 548 - RNA, 21 nt, Artificial Sequence
  Description of Artificial Sequence: Synthetic oligonucleotide
guccccggcuccggggcccug

SEQ ID NO: 549 - RNA, 21 nt, Artificial Sequence
  Description of Artificial Sequence: Synthetic oligonucleotide
ggccccggagccggggacgag

SEQ ID NO: 550 - RNA, 21 nt, Artificial Sequence
  Description of Artificial Sequence: Synthetic oligonucleotide
cguccccggcuccggggcccu

SEQ ID NO: 551 - RNA, 21 nt, Artificial Sequence
  Description of Artificial Sequence: Synthetic oligonucleotide
gccccggagccggggacgagg

SEQ ID NO: 552 - RNA, 21 nt, Artificial Sequence
  Description of Artificial Sequence: Synthetic oligonucleotide
ucguccccggcuccggggccc

SEQ ID NO: 553 - RNA, 21 nt, Artificial Sequence
  Description of Artificial Sequence: Synthetic oligonucleotide
ccccggagccggggacgaggu

SEQ ID NO: 554 - RNA, 21 nt, Artificial Sequence
  Description of Artificial Sequence: Synthetic oligonucleotide
cucguccccggcuccggggcc

SEQ ID NO: 555 - RNA, 21 nt, Artificial Sequence
  Description of Artificial Sequence: Synthetic oligonucleotide
cccggagccggggacgagguc

SEQ ID NO: 556 - RNA, 21 nt, Artificial Sequence
  Description of Artificial Sequence: Synthetic oligonucleotide
ccucguccccggcuccggggc

SEQ ID NO: 557 - RNA, 21 nt, Artificial Sequence
  Description of Artificial Sequence: Synthetic oligonucleotide
ccggagccggggacgagguca

SEQ ID NO: 558 - RNA, 21 nt, Artificial Sequence
  Description of Artificial Sequence: Synthetic oligonucleotide
accucguccccggcuccgggg

SEQ ID NO: 559 - RNA, 21 nt, Artificial Sequence
  Description of Artificial Sequence: Synthetic oligonucleotide
cggagccggggacgaggucag

SEQ ID NO: 560 - RNA, 21 nt, Artificial Sequence
  Description of Artificial Sequence: Synthetic oligonucleotide
gaccucguccccggcuccggg

SEQ ID NO: 561 - RNA, 21 nt, Artificial Sequence
  Description of Artificial Sequence: Synthetic oligonucleotide
ggagccggggacgaggucagg

SEQ ID NO: 562 - RNA, 21 nt, Artificial Sequence
  Description of Artificial Sequence: Synthetic oligonucleotide
ugaccucguccccggcuccgg

SEQ ID NO: 563 - RNA, 21 nt, Artificial Sequence
  Description of Artificial Sequence: Synthetic oligonucleotide
gagccggggacgaggucaggu

SEQ ID NO: 564 - RNA, 21 nt, Artificial Sequence
  Description of Artificial Sequence: Synthetic oligonucleotide
cugaccucguccccggcuccg

SEQ ID NO: 565 - RNA, 21 nt, Artificial Sequence
  Description of Artificial Sequence: Synthetic oligonucleotide
agccggggacgaggucagguu

SEQ ID NO: 566 - RNA, 21 nt, Artificial Sequence
  Description of Artificial Sequence: Synthetic oligonucleotide
ccugaccucguccccggcucc

SEQ ID NO: 567 - RNA, 21 nt, Artificial Sequence
  Description of Artificial Sequence: Synthetic oligonucleotide
gccggggacgaggucagguuc

SEQ ID NO: 568 - RNA, 21 nt, Artificial Sequence
  Description of Artificial Sequence: Synthetic oligonucleotide
accugaccucguccccggcuc

SEQ ID NO: 569 - RNA, 21 nt, Artificial Sequence
  Description of Artificial Sequence: Synthetic oligonucleotide
ccggggacgaggucagguucc

SEQ ID NO: 570 - RNA, 21 nt, Artificial Sequence
  Description of Artificial Sequence: Synthetic oligonucleotide
aaccugaccucguccccggcu

SEQ ID NO: 571 - RNA, 21 nt, Artificial Sequence
  Description of Artificial Sequence: Synthetic oligonucleotide
cggggacgaggucagguuccc

SEQ ID NO: 572 - RNA, 21 nt, Artificial Sequence
  Description of Artificial Sequence: Synthetic oligonucleotide
gaaccugaccucguccccggc

SEQ ID NO: 573 - RNA, 21 nt, Artificial Sequence
  Description of Artificial Sequence: Synthetic oligonucleotide
ggggacgaggucagguucccu

SEQ ID NO: 574 - RNA, 21 nt, Artificial Sequence
  Description of Artificial Sequence: Synthetic oligonucleotide
ggaaccugaccucguccccgg

SEQ ID NO: 575 - RNA, 21 nt, Artificial Sequence
  Description of Artificial Sequence: Synthetic oligonucleotide
gggacgaggucagguucccuu

SEQ ID NO: 576 - RNA, 21 nt, Artificial Sequence
  Description of Artificial Sequence: Synthetic oligonucleotide
gggaaccugaccucguccccg

SEQ ID NO: 577 - RNA, 21 nt, Artificial Sequence
  Description of Artificial Sequence: Synthetic oligonucleotide
ggacgaggucagguucccuug

SEQ ID NO: 578 - RNA, 21 nt, Artificial Sequence
  Description of Artificial Sequence: Synthetic oligonucleotide
agggaaccugaccucgucccc

SEQ ID NO: 579 - RNA, 21 nt, Artificial Sequence
  Description of Artificial Sequence: Synthetic oligonucleotide
gacgaggucagguucccuugu

SEQ ID NO: 580 - RNA, 21 nt, Artificial Sequence
  Description of Artificial Sequence: Synthetic oligonucleotide
aagggaaccugaccucguccc

SEQ ID NO: 581 - RNA, 21 nt, Artificial Sequence
  Description of Artificial Sequence: Synthetic oligonucleotide
acgaggucagguucccuuguu

SEQ ID NO: 582 - RNA, 21 nt, Artificial Sequence
  Description of Artificial Sequence: Synthetic oligonucleotide
caagggaaccugaccucgucc

SEQ ID NO: 583 - RNA, 21 nt, Artificial Sequence
  Description of Artificial Sequence: Synthetic oligonucleotide
cgaggucagguucccuuguua

SEQ ID NO: 584 - RNA, 21 nt, Artificial Sequence
  Description of Artificial Sequence: Synthetic oligonucleotide
acaagggaaccugaccucguc

SEQ ID NO: 585 - RNA, 21 nt, Artificial Sequence
  Description of Artificial Sequence: Synthetic oligonucleotide
gaggucagguucccuuguuac

SEQ ID NO: 586 - RNA, 21 nt, Artificial Sequence
  Description of Artificial Sequence: Synthetic oligonucleotide
aacaagggaaccugaccucgu

SEQ ID NO: 587 - RNA, 21 nt, Artificial Sequence
  Description of Artificial Sequence: Synthetic oligonucleotide
aggucagguucccuuguuacc

SEQ ID NO: 588 - RNA, 21 nt, Artificial Sequence
  Description of Artificial Sequence: Synthetic oligonucleotide
uaacaagggaaccugaccucg

SEQ ID NO: 589 - RNA, 21 nt, Artificial Sequence
  Description of Artificial Sequence: Synthetic oligonucleotide
ggucagguucccuuguuaccg

SEQ ID NO: 590 - RNA, 21 nt, Artificial Sequence
  Description of Artificial Sequence: Synthetic oligonucleotide
guaacaagggaaccugaccuc

SEQ ID NO: 591 - RNA, 21 nt, Artificial Sequence
  Description of Artificial Sequence: Synthetic oligonucleotide
gucagguucccuuguuaccgc

SEQ ID NO: 592 - RNA, 21 nt, Artificial Sequence
  Description of Artificial Sequence: Synthetic oligonucleotide
gguaacaagggaaccugaccu

SEQ ID NO: 593 - RNA, 21 nt, Artificial Sequence
  Description of Artificial Sequence: Synthetic oligonucleotide
ucagguucccuuguuaccgcu

SEQ ID NO: 594 - RNA, 21 nt, Artificial Sequence
  Description of Artificial Sequence: Synthetic oligonucleotide
cgguaacaagggaaccugacc

SEQ ID NO: 595 - RNA, 21 nt, Artificial Sequence
  Description of Artificial Sequence: Synthetic oligonucleotide
cagguucccuuguuaccgcug

SEQ ID NO: 596 - RNA, 21 nt, Artificial Sequence
  Description of Artificial Sequence: Synthetic oligonucleotide
gcgguaacaagggaaccugac

SEQ ID NO: 597 - RNA, 21 nt, Artificial Sequence
  Description of Artificial Sequence: Synthetic oligonucleotide
agguucccuuguuaccgcugg

SEQ ID NO: 598 - RNA, 21 nt, Artificial Sequence
  Description of Artificial Sequence: Synthetic oligonucleotide
agcgguaacaagggaaccuga

SEQ ID NO: 599 - RNA, 21 nt, Artificial Sequence
  Description of Artificial Sequence: Synthetic oligonucleotide
gguucccuuguuaccgcuggg

SEQ ID NO: 600 - RNA, 21 nt, Artificial Sequence
  Description of Artificial Sequence: Synthetic oligonucleotide
cagcgguaacaagggaaccug

SEQ ID NO: 601 - RNA, 21 nt, Artificial Sequence
  Description of Artificial Sequence: Synthetic oligonucleotide
guucccuuguuaccgcugggu

SEQ ID NO: 602 - RNA, 21 nt, Artificial Sequence
  Description of Artificial Sequence: Synthetic oligonucleotide
ccagcgguaacaagggaaccu

SEQ ID NO: 603 - RNA, 21 nt, Artificial Sequence
  Description of Artificial Sequence: Synthetic oligonucleotide
uucccuuguuaccgcugggug

SEQ ID NO: 604 - RNA, 21 nt, Artificial Sequence
  Description of Artificial Sequence: Synthetic oligonucleotide
cccagcgguaacaagggaacc

SEQ ID NO: 605 - RNA, 21 nt, Artificial Sequence
  Description of Artificial Sequence: Synthetic oligonucleotide
ucccuuguuaccgcugggugg

SEQ ID NO: 606 - RNA, 21 nt, Artificial Sequence
  Description of Artificial Sequence: Synthetic oligonucleotide
acccagcgguaacaagggaac

SEQ ID NO: 607 - RNA, 21 nt, Artificial Sequence
  Description of Artificial Sequence: Synthetic oligonucleotide
cccuuguuaccgcugggugga

SEQ ID NO: 608 - RNA, 21 nt, Artificial Sequence
  Description of Artificial Sequence: Synthetic oligonucleotide
cacccagcgguaacaagggaa

SEQ ID NO: 609 - RNA, 21 nt, Artificial Sequence
  Description of Artificial Sequence: Synthetic oligonucleotide
ccuuguuaccgcuggguggag

SEQ ID NO: 610 - RNA, 21 nt, Artificial Sequence
  Description of Artificial Sequence: Synthetic oligonucleotide
ccacccagcgguaacaaggga

SEQ ID NO: 611 - RNA, 21 nt, Artificial Sequence
  Description of Artificial Sequence: Synthetic oligonucleotide
cuuguuaccgcuggguggagg

SEQ ID NO: 612 - RNA, 21 nt, Artificial Sequence
  Description of Artificial Sequence: Synthetic oligonucleotide
uccacccagcgguaacaaggg

SEQ ID NO: 613 - RNA, 21 nt, Artificial Sequence
  Description of Artificial Sequence: Synthetic oligonucleotide
uuguuaccgcuggguggaggg

SEQ ID NO: 614 - RNA, 21 nt, Artificial Sequence
  Description of Artificial Sequence: Synthetic oligonucleotide
cuccacccagcgguaacaagg

SEQ ID NO: 615 - RNA, 21 nt, Artificial Sequence
  Description of Artificial Sequence: Synthetic oligonucleotide
uguuaccgcuggguggagggc

SEQ ID NO: 616 - RNA, 21 nt, Artificial Sequence
  Description of Artificial Sequence: Synthetic oligonucleotide
ccuccacccagcgguaacaag

SEQ ID NO: 617 - RNA, 21 nt, Artificial Sequence
  Description of Artificial Sequence: Synthetic oligonucleotide
guuaccgcuggguggagggca

SEQ ID NO: 618 - RNA, 21 nt, Artificial Sequence
  Description of Artificial Sequence: Synthetic oligonucleotide
cccuccacccagcgguaacaa

SEQ ID NO: 619 - RNA, 21 nt, Artificial Sequence
  Description of Artificial Sequence: Synthetic oligonucleotide
uuaccgcuggguggagggcaa

SEQ ID NO: 620 - RNA, 21 nt, Artificial Sequence
  Description of Artificial Sequence: Synthetic oligonucleotide
gcccuccacccagcgguaaca

SEQ ID NO: 621 - RNA, 21 nt, Artificial Sequence
  Description of Artificial Sequence: Synthetic oligonucleotide
uaccgcuggguggagggcaac

SEQ ID NO: 622 - RNA, 21 nt, Artificial Sequence
  Description of Artificial Sequence: Synthetic oligonucleotide
ugcccuccacccagcgguaac

SEQ ID NO: 623 - RNA, 21 nt, Artificial Sequence
  Description of Artificial Sequence: Synthetic oligonucleotide
accgcuggguggagggcaacg

SEQ ID NO: 624 - RNA, 21 nt, Artificial Sequence
  Description of Artificial Sequence: Synthetic oligonucleotide
uugcccuccacccagcgguaa

SEQ ID NO: 625 - RNA, 21 nt, Artificial Sequence
  Description of Artificial Sequence: Synthetic oligonucleotide
ccgcuggguggagggcaacgg

SEQ ID NO: 626 - RNA, 21 nt, Artificial Sequence
  Description of Artificial Sequence: Synthetic oligonucleotide
guugcccuccacccagcggua

SEQ ID NO: 627 - RNA, 21 nt, Artificial Sequence
  Description of Artificial Sequence: Synthetic oligonucleotide
cgcuggguggagggcaacggc

SEQ ID NO: 628 - RNA, 21 nt, Artificial Sequence
  Description of Artificial Sequence: Synthetic oligonucleotide
cguugcccuccacccagcggu

SEQ ID NO: 629 - RNA, 21 nt, Artificial Sequence
  Description of Artificial Sequence: Synthetic oligonucleotide
gcuggguggagggcaacggcg

SEQ ID NO: 630 - RNA, 21 nt, Artificial Sequence
  Description of Artificial Sequence: Synthetic oligonucleotide
ccguugcccuccacccagcgg

SEQ ID NO: 631 - RNA, 21 nt, Artificial Sequence
  Description of Artificial Sequence: Synthetic oligonucleotide
cuggguggagggcaacggcgu

SEQ ID NO: 632 - RNA, 21 nt, Artificial Sequence
  Description of Artificial Sequence: Synthetic oligonucleotide
gccguugcccuccacccagcg

SEQ ID NO: 633 - RNA, 21 nt, Artificial Sequence
  Description of Artificial Sequence: Synthetic oligonucleotide
uggguggagggcaacggcguc

SEQ ID NO: 634 - RNA, 21 nt, Artificial Sequence
  Description of Artificial Sequence: Synthetic oligonucleotide
cgccguugcccuccacccagc

SEQ ID NO: 635 - RNA, 21 nt, Artificial Sequence
  Description of Artificial Sequence: Synthetic oligonucleotide
ggguggagggcaacggcgucc

SEQ ID NO: 636 - RNA, 21 nt, Artificial Sequence
  Description of Artificial Sequence: Synthetic oligonucleotide
acgccguugcccuccacccag

SEQ ID NO: 637 - RNA, 21 nt, Artificial Sequence
  Description of Artificial Sequence: Synthetic oligonucleotide
gguggagggcaacggcguccu

SEQ ID NO: 638 - RNA, 21 nt, Artificial Sequence
  Description of Artificial Sequence: Synthetic oligonucleotide
gacgccguugcccuccaccca

SEQ ID NO: 639 - RNA, 21 nt, Artificial Sequence
  Description of Artificial Sequence: Synthetic oligonucleotide
guggagggcaacggcguccug

SEQ ID NO: 640 - RNA, 21 nt, Artificial Sequence
  Description of Artificial Sequence: Synthetic oligonucleotide
ggacgccguugcccuccaccc

SEQ ID NO: 641 - RNA, 21 nt, Artificial Sequence
  Description of Artificial Sequence: Synthetic oligonucleotide
uggagggcaacggcguccuga

SEQ ID NO: 642 - RNA, 21 nt, Artificial Sequence
  Description of Artificial Sequence: Synthetic oligonucleotide
aggacgccguugcccuccacc

SEQ ID NO: 643 - RNA, 21 nt, Artificial Sequence
  Description of Artificial Sequence: Synthetic oligonucleotide
ggagggcaacggcguccugag

SEQ ID NO: 644 - RNA, 21 nt, Artificial Sequence
  Description of Artificial Sequence: Synthetic oligonucleotide
caggacgccguugcccuccac

SEQ ID NO: 645 - RNA, 21 nt, Artificial Sequence
  Description of Artificial Sequence: Synthetic oligonucleotide
gagggcaacggcguccugagc

SEQ ID NO: 646 - RNA, 21 nt, Artificial Sequence
  Description of Artificial Sequence: Synthetic oligonucleotide
ucaggacgccguugcccucca

SEQ ID NO: 647 - RNA, 21 nt, Artificial Sequence
  Description of Artificial Sequence: Synthetic oligonucleotide
agggcaacggcguccugagcc

SEQ ID NO: 648 - RNA, 21 nt, Artificial Sequence
  Description of Artificial Sequence: Synthetic oligonucleotide
cucaggacgccguugcccucc

SEQ ID NO: 649 - RNA, 21 nt, Artificial Sequence
  Description of Artificial Sequence: Synthetic oligonucleotide
gggcaacggcguccugagccu

SEQ ID NO: 650 - RNA, 21 nt, Artificial Sequence
  Description of Artificial Sequence: Synthetic oligonucleotide
gcucaggacgccguugcccuc

SEQ ID NO: 651 - RNA, 21 nt, Artificial Sequence
  Description of Artificial Sequence: Synthetic oligonucleotide
ggcaacggcguccugagccug

SEQ ID NO: 652 - RNA, 21 nt, Artificial Sequence
  Description of Artificial Sequence: Synthetic oligonucleotide
ggcucaggacgccguugcccu

SEQ ID NO: 653 - RNA, 21 nt, Artificial Sequence
  Description of Artificial Sequence: Synthetic oligonucleotide
gcaacggcguccugagccugc

SEQ ID NO: 654 - RNA, 21 nt, Artificial Sequence
  Description of Artificial Sequence: Synthetic oligonucleotide
aggcucaggacgccguugccc

SEQ ID NO: 655 - RNA, 21 nt, Artificial Sequence
  Description of Artificial Sequence: Synthetic oligonucleotide
caacggcguccugagccugcc

SEQ ID NO: 656 - RNA, 21 nt, Artificial Sequence
  Description of Artificial Sequence: Synthetic oligonucleotide
caggcucaggacgccguugcc

SEQ ID NO: 657 - RNA, 21 nt, Artificial Sequence
  Description of Artificial Sequence: Synthetic oligonucleotide
aacggcguccugagccugccu

SEQ ID NO: 658 - RNA, 21 nt, Artificial Sequence
  Description of Artificial Sequence: Synthetic oligonucleotide
gcaggcucaggacgccguugc

SEQ ID NO: 659 - RNA, 21 nt, Artificial Sequence
  Description of Artificial Sequence: Synthetic oligonucleotide
acggcguccugagccugccug

SEQ ID NO: 660 - RNA, 21 nt, Artificial Sequence
  Description of Artificial Sequence: Synthetic oligonucleotide
ggcaggcucaggacgccguug

SEQ ID NO: 661 - RNA, 21 nt, Artificial Sequence
  Description of Artificial Sequence: Synthetic oligonucleotide
cggcguccugagccugccuga

SEQ ID NO: 662 - RNA, 21 nt, Artificial Sequence
  Description of Artificial Sequence: Synthetic oligonucleotide
aggcaggcucaggacgccguu

SEQ ID NO: 663 - RNA, 21 nt, Artificial Sequence
  Description of Artificial Sequence: Synthetic oligonucleotide
ggcguccugagccugccugaa

SEQ ID NO: 664 - RNA, 21 nt, Artificial Sequence
  Description of Artificial Sequence: Synthetic oligonucleotide
caggcaggcucaggacgccgu

SEQ ID NO: 665 - RNA, 21 nt, Artificial Sequence
  Description of Artificial Sequence: Synthetic oligonucleotide
gcguccugagccugccugaag

SEQ ID NO: 666 - RNA, 21 nt, Artificial Sequence
  Description of Artificial Sequence: Synthetic oligonucleotide
ucaggcaggcucaggacgccg

SEQ ID NO: 667 - RNA, 21 nt, Artificial Sequence
  Description of Artificial Sequence: Synthetic oligonucleotide
cguccugagccugccugaagg

SEQ ID NO: 668 - RNA, 21 nt, Artificial Sequence
  Description of Artificial Sequence: Synthetic oligonucleotide
uucaggcaggcucaggacgcc

SEQ ID NO: 669 - RNA, 21 nt, Artificial Sequence
  Description of Artificial Sequence: Synthetic oligonucleotide
guccugagccugccugaaggc

SEQ ID NO: 670 - RNA, 21 nt, Artificial Sequence
  Description of Artificial Sequence: Synthetic oligonucleotide
cuucaggcaggcucaggacgc

SEQ ID NO: 671 - RNA, 21 nt, Artificial Sequence
  Description of Artificial Sequence: Synthetic oligonucleotide
uccugagccugccugaaggca

SEQ ID NO: 672 - RNA, 21 nt, Artificial Sequence
  Description of Artificial Sequence: Synthetic oligonucleotide
ccuucaggcaggcucaggacg

SEQ ID NO: 673 - RNA, 21 nt, Artificial Sequence
  Description of Artificial Sequence: Synthetic oligonucleotide
ccugagccugccugaaggcac

SEQ ID NO: 674 - RNA, 21 nt, Artificial Sequence
  Description of Artificial Sequence: Synthetic oligonucleotide
gccuucaggcaggcucaggac

SEQ ID NO: 675 - RNA, 21 nt, Artificial Sequence
  Description of Artificial Sequence: Synthetic oligonucleotide
cugagccugccugaaggcacc

SEQ ID NO: 676 - RNA, 21 nt, Artificial Sequence
  Description of Artificial Sequence: Synthetic oligonucleotide
ugccuucaggcaggcucagga

SEQ ID NO: 677 - RNA, 21 nt, Artificial Sequence
  Description of Artificial Sequence: Synthetic oligonucleotide
ugagccugccugaaggcaccg

SEQ ID NO: 678 - RNA, 21 nt, Artificial Sequence
  Description of Artificial Sequence: Synthetic oligonucleotide
gugccuucaggcaggcucagg

SEQ ID NO: 679 - RNA, 21 nt, Artificial Sequence
  Description of Artificial Sequence: Synthetic oligonucleotide
gagccugccugaaggcaccgg

SEQ ID NO: 680 - RNA, 21 nt, Artificial Sequence
  Description of Artificial Sequence: Synthetic oligonucleotide
ggugccuucaggcaggcucag

SEQ ID NO: 681 - RNA, 21 nt, Artificial Sequence
  Description of Artificial Sequence: Synthetic oligonucleotide
agccugccugaaggcaccggc

SEQ ID NO: 682 - RNA, 21 nt, Artificial Sequence
  Description of Artificial Sequence: Synthetic oligonucleotide
cggugccuucaggcaggcuca

SEQ ID NO: 683 - RNA, 21 nt, Artificial Sequence
  Description of Artificial Sequence: Synthetic oligonucleotide
gccugccugaaggcaccggcc

SEQ ID NO: 684 - RNA, 21 nt, Artificial Sequence
  Description of Artificial Sequence: Synthetic oligonucleotide
ccggugccuucaggcaggcuc

SEQ ID NO: 685 - RNA, 21 nt, Artificial Sequence
  Description of Artificial Sequence: Synthetic oligonucleotide
ccugccugaaggcaccggccg

SEQ ID NO: 686 - RNA, 21 nt, Artificial Sequence
  Description of Artificial Sequence: Synthetic oligonucleotide
gccggugccuucaggcaggcu

SEQ ID NO: 687 - RNA, 21 nt, Artificial Sequence
  Description of Artificial Sequence: Synthetic oligonucleotide
cugccugaaggcaccggccgc

SEQ ID NO: 688 - RNA, 21 nt, Artificial Sequence
  Description of Artificial Sequence: Synthetic oligonucleotide
ggccggugccuucaggcaggc

SEQ ID NO: 689 - RNA, 21 nt, Artificial Sequence
  Description of Artificial Sequence: Synthetic oligonucleotide
ugccugaaggcaccggccgca

SEQ ID NO: 690 - RNA, 21 nt, Artificial Sequence
  Description of Artificial Sequence: Synthetic oligonucleotide
cggccggugccuucaggcagg

SEQ ID NO: 691 - RNA, 21 nt, Artificial Sequence
  Description of Artificial Sequence: Synthetic oligonucleotide
gccugaaggcaccggccgcac

SEQ ID NO: 692 - RNA, 21 nt, Artificial Sequence
  Description of Artificial Sequence: Synthetic oligonucleotide
gcggccggugccuucaggcag

SEQ ID NO: 693 - RNA, 21 nt, Artificial Sequence
  Description of Artificial Sequence: Synthetic oligonucleotide
ccugaaggcaccggccgcacu

SEQ ID NO: 694 - RNA, 21 nt, Artificial Sequence
  Description of Artificial Sequence: Synthetic oligonucleotide
ugcggccggugccuucaggca

SEQ ID NO: 695 - RNA, 21 nt, Artificial Sequence
  Description of Artificial Sequence: Synthetic oligonucleotide
cugaaggcaccggccgcacug

SEQ ID NO: 696 - RNA, 21 nt, Artificial Sequence
  Description of Artificial Sequence: Synthetic oligonucleotide
gugcggccggugccuucaggc

SEQ ID NO: 697 - RNA, 21 nt, Artificial Sequence
  Description of Artificial Sequence: Synthetic oligonucleotide
ugaaggcaccggccgcacugu

SEQ ID NO: 698 - RNA, 21 nt, Artificial Sequence
  Description of Artificial Sequence: Synthetic oligonucleotide
agugcggccggugccuucagg

SEQ ID NO: 699 - RNA, 21 nt, Artificial Sequence
  Description of Artificial Sequence: Synthetic oligonucleotide
gaaggcaccggccgcacugug

SEQ ID NO: 700 - RNA, 21 nt, Artificial Sequence
  Description of Artificial Sequence: Synthetic oligonucleotide
cagugcggccggugccuucag

SEQ ID NO: 701 - RNA, 21 nt, Artificial Sequence
  Description of Artificial Sequence: Synthetic oligonucleotide
aaggcaccggccgcacugugg

SEQ ID NO: 702 - RNA, 21 nt, Artificial Sequence
  Description of Artificial Sequence: Synthetic oligonucleotide
acagugcggccggugccuuca

SEQ ID NO: 703 - RNA, 21 nt, Artificial Sequence
  Description of Artificial Sequence: Synthetic oligonucleotide
aggcaccggccgcacuguggg

SEQ ID NO: 704 - RNA, 21 nt, Artificial Sequence
  Description of Artificial Sequence: Synthetic oligonucleotide
cacagugcggccggugccuuc

SEQ ID NO: 705 - RNA, 21 nt, Artificial Sequence
  Description of Artificial Sequence: Synthetic oligonucleotide
ggcaccggccgcacugugggc

SEQ ID NO: 706 - RNA, 21 nt, Artificial Sequence
  Description of Artificial Sequence: Synthetic oligonucleotide
ccacagugcggccggugccuu

SEQ ID NO: 707 - RNA, 21 nt, Artificial Sequence
  Description of Artificial Sequence: Synthetic oligonucleotide
gcaccggccgcacugugggcg

SEQ ID NO: 708 - RNA, 21 nt, Artificial Sequence
  Description of Artificial Sequence: Synthetic oligonucleotide
cccacagugcggccggugccu

SEQ ID NO: 709 - RNA, 21 nt, Artificial Sequence
  Description of Artificial Sequence: Synthetic oligonucleotide
caccggccgcacugugggcga

SEQ ID NO: 710 - RNA, 21 nt, Artificial Sequence
  Description of Artificial Sequence: Synthetic oligonucleotide
gcccacagugcggccggugcc

SEQ ID NO: 711 - RNA, 21 nt, Artificial Sequence
  Description of Artificial Sequence: Synthetic oligonucleotide
accggccgcacugugggcgag

SEQ ID NO: 712 - RNA, 21 nt, Artificial Sequence
  Description of Artificial Sequence: Synthetic oligonucleotide
cgcccacagugcggccggugc

SEQ ID NO: 713 - RNA, 21 nt, Artificial Sequence
  Description of Artificial Sequence: Synthetic oligonucleotide
ccggccgcacugugggcgagg

SEQ ID NO: 714 - RNA, 21 nt, Artificial Sequence
  Description of Artificial Sequence: Synthetic oligonucleotide
ucgcccacagugcggccggug

SEQ ID NO: 715 - RNA, 21 nt, Artificial Sequence
  Description of Artificial Sequence: Synthetic oligonucleotide
cggccgcacugugggcgagga

SEQ ID NO: 716 - RNA, 21 nt, Artificial Sequence
  Description of Artificial Sequence: Synthetic oligonucleotide
cucgcccacagugcggccggu

SEQ ID NO: 717 - RNA, 21 nt, Artificial Sequence
  Description of Artificial Sequence: Synthetic oligonucleotide
ggccgcacugugggcgaggac

SEQ ID NO: 718 - RNA, 21 nt, Artificial Sequence
  Description of Artificial Sequence: Synthetic oligonucleotide
ccucgcccacagugcggccgg

SEQ ID NO: 719 - RNA, 21 nt, Artificial Sequence
  Description of Artificial Sequence: Synthetic oligonucleotide
gccgcacugugggcgaggacc

SEQ ID NO: 720 - RNA, 21 nt, Artificial Sequence
  Description of Artificial Sequence: Synthetic oligonucleotide
uccucgcccacagugcggccg

SEQ ID NO: 721 - RNA, 21 nt, Artificial Sequence
  Description of Artificial Sequence: Synthetic oligonucleotide
ccgcacugugggcgaggaccc

SEQ ID NO: 722 - RNA, 21 nt, Artificial Sequence
  Description of Artificial Sequence: Synthetic oligonucleotide
guccucgcccacagugcggcc

SEQ ID NO: 723 - RNA, 21 nt, Artificial Sequence
  Description of Artificial Sequence: Synthetic oligonucleotide
cgcacugugggcgaggacccu

SEQ ID NO: 724 - RNA, 21 nt, Artificial Sequence
  Description of Artificial Sequence: Synthetic oligonucleotide
gguccucgcccacagugcggc

SEQ ID NO: 725 - RNA, 21 nt, Artificial Sequence
  Description of Artificial Sequence: Synthetic oligonucleotide
gcacugugggcgaggacccuc

SEQ ID NO: 726 - RNA, 21 nt, Artificial Sequence
  Description of Artificial Sequence: Synthetic oligonucleotide
ggguccucgcccacagugcgg

SEQ ID NO: 727 - RNA, 21 nt, Artificial Sequence
  Description of Artificial Sequence: Synthetic oligonucleotide
cacugugggcgaggacccuca

SEQ ID NO: 728 - RNA, 21 nt, Artificial Sequence
  Description of Artificial Sequence: Synthetic oligonucleotide
aggguccucgcccacagugcg

SEQ ID NO: 729 - RNA, 21 nt, Artificial Sequence
  Description of Artificial Sequence: Synthetic oligonucleotide
acugugggcgaggacccucag

SEQ ID NO: 730 - RNA, 21 nt, Artificial Sequence
  Description of Artificial Sequence: Synthetic oligonucleotide
gaggguccucgcccacagugc

SEQ ID NO: 731 - RNA, 21 nt, Artificial Sequence
  Description of Artificial Sequence: Synthetic oligonucleotide
cugugggcgaggacccucagg

SEQ ID NO: 732 - RNA, 21 nt, Artificial Sequence
  Description of Artificial Sequence: Synthetic oligonucleotide
ugaggguccucgcccacagug

SEQ ID NO: 733 - RNA, 21 nt, Artificial Sequence
  Description of Artificial Sequence: Synthetic oligonucleotide
ugugggcgaggacccucaggg

SEQ ID NO: 734 - RNA, 21 nt, Artificial Sequence
  Description of Artificial Sequence: Synthetic oligonucleotide
cugaggguccucgcccacagu

SEQ ID NO: 735 - RNA, 21 nt, Artificial Sequence
  Description of Artificial Sequence: Synthetic oligonucleotide
gugggcgaggacccucagggc

SEQ ID NO: 736 - RNA, 21 nt, Artificial Sequence
  Description of Artificial Sequence: Synthetic oligonucleotide
ccugaggguccucgcccacag

SEQ ID NO: 737 - RNA, 21 nt, Artificial Sequence
  Description of Artificial Sequence: Synthetic oligonucleotide
ugggcgaggacccucagggcc

SEQ ID NO: 738 - RNA, 21 nt, Artificial Sequence
  Description of Artificial Sequence: Synthetic oligonucleotide
cccugaggguccucgcccaca

SEQ ID NO: 739 - RNA, 21 nt, Artificial Sequence
  Description of Artificial Sequence: Synthetic oligonucleotide
gggcgaggacccucagggccu

SEQ ID NO: 740 - RNA, 21 nt, Artificial Sequence
  Description of Artificial Sequence: Synthetic oligonucleotide
gcccugaggguccucgcccac

SEQ ID NO: 741 - RNA, 21 nt, Artificial Sequence
  Description of Artificial Sequence: Synthetic oligonucleotide
ggcgaggacccucagggccug

SEQ ID NO: 742 - RNA, 21 nt, Artificial Sequence
  Description of Artificial Sequence: Synthetic oligonucleotide
ggcccugaggguccucgccca

SEQ ID NO: 743 - RNA, 21 nt, Artificial Sequence
  Description of Artificial Sequence: Synthetic oligonucleotide
gcgaggacccucagggccugu

SEQ ID NO: 744 - RNA, 21 nt, Artificial Sequence
  Description of Artificial Sequence: Synthetic oligonucleotide
aggcccugaggguccucgccc

SEQ ID NO: 745 - RNA, 21 nt, Artificial Sequence
  Description of Artificial Sequence: Synthetic oligonucleotide
cgaggacccucagggccuguu

SEQ ID NO: 746 - RNA, 21 nt, Artificial Sequence
  Description of Artificial Sequence: Synthetic oligonucleotide
caggcccugaggguccucgcc

SEQ ID NO: 747 - RNA, 21 nt, Artificial Sequence
  Description of Artificial Sequence: Synthetic oligonucleotide
gaggacccucagggccuguuc

SEQ ID NO: 748 - RNA, 21 nt, Artificial Sequence
  Description of Artificial Sequence: Synthetic oligonucleotide
acaggcccugaggguccucgc

SEQ ID NO: 749 - RNA, 21 nt, Artificial Sequence
  Description of Artificial Sequence: Synthetic oligonucleotide
aggacccucagggccuguucc

SEQ ID NO: 750 - RNA, 21 nt, Artificial Sequence
  Description of Artificial Sequence: Synthetic oligonucleotide
aacaggcccugaggguccucg

SEQ ID NO: 751 - RNA, 21 nt, Artificial Sequence
  Description of Artificial Sequence: Synthetic oligonucleotide
ggacccucagggccuguucca

SEQ ID NO: 752 - RNA, 21 nt, Artificial Sequence
  Description of Artificial Sequence: Synthetic oligonucleotide
gaacaggcccugaggguccuc

SEQ ID NO: 753 - RNA, 21 nt, Artificial Sequence
  Description of Artificial Sequence: Synthetic oligonucleotide
gacccucagggccuguuccag

SEQ ID NO: 754 - RNA, 21 nt, Artificial Sequence
  Description of Artificial Sequence: Synthetic oligonucleotide
ggaacaggcccugaggguccu

SEQ ID NO: 755 - RNA, 21 nt, Artificial Sequence
  Description of Artificial Sequence: Synthetic oligonucleotide
acccucagggccuguuccaga

SEQ ID NO: 756 - RNA, 21 nt, Artificial Sequence
  Description of Artificial Sequence: Synthetic oligonucleotide
uggaacaggcccugagggucc

SEQ ID NO: 757 - RNA, 21 nt, Artificial Sequence
  Description of Artificial Sequence: Synthetic oligonucleotide
cccucagggccuguuccagaa

SEQ ID NO: 758 - RNA, 21 nt, Artificial Sequence
  Description of Artificial Sequence: Synthetic oligonucleotide
cuggaacaggcccugaggguc

SEQ ID NO: 759 - RNA, 21 nt, Artificial Sequence
  Description of Artificial Sequence: Synthetic oligonucleotide
ccucagggccuguuccagaaa

SEQ ID NO: 760 - RNA, 21 nt, Artificial Sequence
  Description of Artificial Sequence: Synthetic oligonucleotide
ucuggaacaggcccugagggu

SEQ ID NO: 761 - RNA, 21 nt, Artificial Sequence
  Description of Artificial Sequence: Synthetic oligonucleotide
cucagggccuguuccagaaac

SEQ ID NO: 762 - RNA, 21 nt, Artificial Sequence
  Description of Artificial Sequence: Synthetic oligonucleotide
uucuggaacaggcccugaggg

SEQ ID NO: 763 - RNA, 21 nt, Artificial Sequence
  Description of Artificial Sequence: Synthetic oligonucleotide
ucagggccuguuccagaaaca

SEQ ID NO: 764 - RNA, 21 nt, Artificial Sequence
  Description of Artificial Sequence: Synthetic oligonucleotide
uuucuggaacaggcccugagg

SEQ ID NO: 765 - RNA, 21 nt, Artificial Sequence
  Description of Artificial Sequence: Synthetic oligonucleotide
cagggccuguuccagaaacac

SEQ ID NO: 766 - RNA, 21 nt, Artificial Sequence
  Description of Artificial Sequence: Synthetic oligonucleotide
guuucuggaacaggcccugag

SEQ ID NO: 767 - RNA, 21 nt, Artificial Sequence
  Description of Artificial Sequence: Synthetic oligonucleotide
agggccuguuccagaaacacc

SEQ ID NO: 768 - RNA, 21 nt, Artificial Sequence
  Description of Artificial Sequence: Synthetic oligonucleotide
uguuucuggaacaggcccuga

SEQ ID NO: 769 - RNA, 21 nt, Artificial Sequence
  Description of Artificial Sequence: Synthetic oligonucleotide
gggccuguuccagaaacaccg

SEQ ID NO: 770 - RNA, 21 nt, Artificial Sequence
  Description of Artificial Sequence: Synthetic oligonucleotide
guguuucuggaacaggcccug

SEQ ID NO: 771 - RNA, 21 nt, Artificial Sequence
  Description of Artificial Sequence: Synthetic oligonucleotide
ggccuguuccagaaacaccgg

SEQ ID NO: 772 - RNA, 21 nt, Artificial Sequence
  Description of Artificial Sequence: Synthetic oligonucleotide
gguguuucuggaacaggcccu

SEQ ID NO: 773 - RNA, 21 nt, Artificial Sequence
  Description of Artificial Sequence: Synthetic oligonucleotide
gccuguuccagaaacaccggg

SEQ ID NO: 774 - RNA, 21 nt, Artificial Sequence
  Description of Artificial Sequence: Synthetic oligonucleotide
cgguguuucuggaacaggccc

SEQ ID NO: 775 - RNA, 21 nt, Artificial Sequence
  Description of Artificial Sequence: Synthetic oligonucleotide
ccuguuccagaaacaccggga

SEQ ID NO: 776 - RNA, 21 nt, Artificial Sequence
  Description of Artificial Sequence: Synthetic oligonucleotide
ccgguguuucuggaacaggcc

SEQ ID NO: 777 - RNA, 21 nt, Artificial Sequence
  Description of Artificial Sequence: Synthetic oligonucleotide
cuguuccagaaacaccgggaa

SEQ ID NO: 778 - RNA, 21 nt, Artificial Sequence
  Description of Artificial Sequence: Synthetic oligonucleotide
cccgguguuucuggaacaggc

SEQ ID NO: 779 - RNA, 21 nt, Artificial Sequence
  Description of Artificial Sequence: Synthetic oligonucleotide
uguuccagaaacaccgggaag

SEQ ID NO: 780 - RNA, 21 nt, Artificial Sequence
  Description of Artificial Sequence: Synthetic oligonucleotide
ucccgguguuucuggaacagg

SEQ ID NO: 781 - RNA, 21 nt, Artificial Sequence
  Description of Artificial Sequence: Synthetic oligonucleotide
guuccagaaacaccgggaaga

SEQ ID NO: 782 - RNA, 21 nt, Artificial Sequence
  Description of Artificial Sequence: Synthetic oligonucleotide
uucccgguguuucuggaacag

SEQ ID NO: 783 - RNA, 21 nt, Artificial Sequence
  Description of Artificial Sequence: Synthetic oligonucleotide
uuccagaaacaccgggaagaa

SEQ ID NO: 784 - RNA, 21 nt, Artificial Sequence
  Description of Artificial Sequence: Synthetic oligonucleotide
cuucccgguguuucuggaaca

SEQ ID NO: 785 - RNA, 21 nt, Artificial Sequence
  Description of Artificial Sequence: Synthetic oligonucleotide
uccagaaacaccgggaagaag

SEQ ID NO: 786 - RNA, 21 nt, Artificial Sequence
  Description of Artificial Sequence: Synthetic oligonucleotide
ucuucccgguguuucuggaac

SEQ ID NO: 787 - RNA, 21 nt, Artificial Sequence
  Description of Artificial Sequence: Synthetic oligonucleotide
ccagaaacaccgggaagaaga

SEQ ID NO: 788 - RNA, 21 nt, Artificial Sequence
  Description of Artificial Sequence: Synthetic oligonucleotide
uucuucccgguguuucuggaa

SEQ ID NO: 789 - RNA, 21 nt, Artificial Sequence
  Description of Artificial Sequence: Synthetic oligonucleotide
cagaaacaccgggaagaagag

SEQ ID NO: 790 - RNA, 21 nt, Artificial Sequence
  Description of Artificial Sequence: Synthetic oligonucleotide
cuucuucccgguguuucugga

SEQ ID NO: 791 - RNA, 21 nt, Artificial Sequence
  Description of Artificial Sequence: Synthetic oligonucleotide
agaaacaccgggaagaagagc

SEQ ID NO: 792 - RNA, 21 nt, Artificial Sequence
  Description of Artificial Sequence: Synthetic oligonucleotide
ucuucuucccgguguuucugg

SEQ ID NO: 793 - RNA, 21 nt, Artificial Sequence
  Description of Artificial Sequence: Synthetic oligonucleotide
gaaacaccgggaagaagagcu

SEQ ID NO: 794 - RNA, 21 nt, Artificial Sequence
  Description of Artificial Sequence: Synthetic oligonucleotide
cucuucuucccgguguuucug

SEQ ID NO: 795 - RNA, 21 nt, Artificial Sequence
  Description of Artificial Sequence: Synthetic oligonucleotide
aaacaccgggaagaagagcug

SEQ ID NO: 796 - RNA, 21 nt, Artificial Sequence
  Description of Artificial Sequence: Synthetic oligonucleotide
gcucuucuucccgguguuucu

SEQ ID NO: 797 - RNA, 21 nt, Artificial Sequence
  Description of Artificial Sequence: Synthetic oligonucleotide
aacaccgggaagaagagcugg

SEQ ID NO: 798 - RNA, 21 nt, Artificial Sequence
  Description of Artificial Sequence: Synthetic oligonucleotide
agcucuucuucccgguguuuc

SEQ ID NO: 799 - RNA, 21 nt, Artificial Sequence
  Description of Artificial Sequence: Synthetic oligonucleotide
acaccgggaagaagagcugga

SEQ ID NO: 800 - RNA, 21 nt, Artificial Sequence
  Description of Artificial Sequence: Synthetic oligonucleotide
cagcucuucuucccgguguuu

SEQ ID NO: 801 - RNA, 21 nt, Artificial Sequence
  Description of Artificial Sequence: Synthetic oligonucleotide
caccgggaagaagagcuggaa

SEQ ID NO: 802 - RNA, 21 nt, Artificial Sequence
  Description of Artificial Sequence: Synthetic oligonucleotide
ccagcucuucuucccgguguu

SEQ ID NO: 803 - RNA, 21 nt, Artificial Sequence
  Description of Artificial Sequence: Synthetic oligonucleotide
accgggaagaagagcuggaag

SEQ ID NO: 804 - RNA, 21 nt, Artificial Sequence
  Description of Artificial Sequence: Synthetic oligonucleotide
uccagcucuucuucccggugu

SEQ ID NO: 805 - RNA, 21 nt, Artificial Sequence
  Description of Artificial Sequence: Synthetic oligonucleotide
ccgggaagaagagcuggaaga

SEQ ID NO: 806 - RNA, 21 nt, Artificial Sequence
  Description of Artificial Sequence: Synthetic oligonucleotide
uuccagcucuucuucccggug

SEQ ID NO: 807 - RNA, 21 nt, Artificial Sequence
  Description of Artificial Sequence: Synthetic oligonucleotide
cgggaagaagagcuggaagag

SEQ ID NO: 808 - RNA, 21 nt, Artificial Sequence
  Description of Artificial Sequence: Synthetic oligonucleotide
cuuccagcucuucuucccggu

SEQ ID NO: 809 - RNA, 21 nt, Artificial Sequence
  Description of Artificial Sequence: Synthetic oligonucleotide
gggaagaagagcuggaagaga

SEQ ID NO: 810 - RNA, 21 nt, Artificial Sequence
  Description of Artificial Sequence: Synthetic oligonucleotide
ucuuccagcucuucuucccgg

SEQ ID NO: 811 - RNA, 21 nt, Artificial Sequence
  Description of Artificial Sequence: Synthetic oligonucleotide
ggaagaagagcuggaagagag

SEQ ID NO: 812 - RNA, 21 nt, Artificial Sequence
  Description of Artificial Sequence: Synthetic oligonucleotide
cucuuccagcucuucuucccg

SEQ ID NO: 813 - RNA, 21 nt, Artificial Sequence
  Description of Artificial Sequence: Synthetic oligonucleotide
gaagaagagcuggaagagaga

SEQ ID NO: 814 - RNA, 21 nt, Artificial Sequence
  Description of Artificial Sequence: Synthetic oligonucleotide
ucucuuccagcucuucuuccc

SEQ ID NO: 815 - RNA, 21 nt, Artificial Sequence
  Description of Artificial Sequence: Synthetic oligonucleotide
aagaagagcuggaagagagaa

SEQ ID NO: 816 - RNA, 21 nt, Artificial Sequence
  Description of Artificial Sequence: Synthetic oligonucleotide
cucucuuccagcucuucuucc

SEQ ID NO: 817 - RNA, 21 nt, Artificial Sequence
  Description of Artificial Sequence: Synthetic oligonucleotide
agaagagcuggaagagagaag

SEQ ID NO: 818 - RNA, 21 nt, Artificial Sequence
  Description of Artificial Sequence: Synthetic oligonucleotide
ucucucuuccagcucuucuuc

SEQ ID NO: 819 - RNA, 21 nt, Artificial Sequence
  Description of Artificial Sequence: Synthetic oligonucleotide
gaagagcuggaagagagaagg

SEQ ID NO: 820 - RNA, 21 nt, Artificial Sequence
  Description of Artificial Sequence: Synthetic oligonucleotide
uucucucuuccagcucuucuu

SEQ ID NO: 821 - RNA, 21 nt, Artificial Sequence
  Description of Artificial Sequence: Synthetic oligonucleotide
aagagcuggaagagagaagga

SEQ ID NO: 822 - RNA, 21 nt, Artificial Sequence
  Description of Artificial Sequence: Synthetic oligonucleotide
cuucucucuuccagcucuucu

SEQ ID NO: 823 - RNA, 21 nt, Artificial Sequence
  Description of Artificial Sequence: Synthetic oligonucleotide
agagcuggaagagagaaggaa

SEQ ID NO: 824 - RNA, 21 nt, Artificial Sequence
  Description of Artificial Sequence: Synthetic oligonucleotide
ccuucucucuuccagcucuuc

SEQ ID NO: 825 - RNA, 21 nt, Artificial Sequence
  Description of Artificial Sequence: Synthetic oligonucleotide
gagcuggaagagagaaggaag

SEQ ID NO: 826 - RNA, 21 nt, Artificial Sequence
  Description of Artificial Sequence: Synthetic oligonucleotide
uccuucucucuuccagcucuu

SEQ ID NO: 827 - RNA, 21 nt, Artificial Sequence
  Description of Artificial Sequence: Synthetic oligonucleotide
agcuggaagagagaaggaagu

SEQ ID NO: 828 - RNA, 21 nt, Artificial Sequence
  Description of Artificial Sequence: Synthetic oligonucleotide
uuccuucucucuuccagcucu

SEQ ID NO: 829 - RNA, 21 nt, Artificial Sequence
  Description of Artificial Sequence: Synthetic oligonucleotide
gcuggaagagagaaggaaguu

SEQ ID NO: 830 - RNA, 21 nt, Artificial Sequence
  Description of Artificial Sequence: Synthetic oligonucleotide
cuuccuucucucuuccagcuc

SEQ ID NO: 831 - RNA, 21 nt, Artificial Sequence
  Description of Artificial Sequence: Synthetic oligonucleotide
cuggaagagagaaggaaguug

SEQ ID NO: 832 - RNA, 21 nt, Artificial Sequence
  Description of Artificial Sequence: Synthetic oligonucleotide
acuuccuucucucuuccagcu

SEQ ID NO: 833 - RNA, 21 nt, Artificial Sequence
  Description of Artificial Sequence: Synthetic oligonucleotide
uggaagagagaaggaaguugu

SEQ ID NO: 834 - RNA, 21 nt, Artificial Sequence
  Description of Artificial Sequence: Synthetic oligonucleotide
aacuuccuucucucuuccagc

SEQ ID NO: 835 - RNA, 21 nt, Artificial Sequence
  Description of Artificial Sequence: Synthetic oligonucleotide
ggaagagagaaggaaguugua

SEQ ID NO: 836 - RNA, 21 nt, Artificial Sequence
  Description of Artificial Sequence: Synthetic oligonucleotide
caacuuccuucucucuuccag

SEQ ID NO: 837 - RNA, 21 nt, Artificial Sequence
  Description of Artificial Sequence: Synthetic oligonucleotide
gaagagagaaggaaguuguac

SEQ ID NO: 838 - RNA, 21 nt, Artificial Sequence
  Description of Artificial Sequence: Synthetic oligonucleotide
acaacuuccuucucucuucca

SEQ ID NO: 839 - RNA, 21 nt, Artificial Sequence
  Description of Artificial Sequence: Synthetic oligonucleotide
aagagagaaggaaguuguacc

SEQ ID NO: 840 - RNA, 21 nt, Artificial Sequence
  Description of Artificial Sequence: Synthetic oligonucleotide
uacaacuuccuucucucuucc

SEQ ID NO: 841 - RNA, 21 nt, Artificial Sequence
  Description of Artificial Sequence: Synthetic oligonucleotide
agagagaaggaaguuguaccg

SEQ ID NO: 842 - RNA, 21 nt, Artificial Sequence
  Description of Artificial Sequence: Synthetic oligonucleotide
guacaacuuccuucucucuuc

SEQ ID NO: 843 - RNA, 21 nt, Artificial Sequence
  Description of Artificial Sequence: Synthetic oligonucleotide
gagagaaggaaguuguaccgg

SEQ ID NO: 844 - RNA, 21 nt, Artificial Sequence
  Description of Artificial Sequence: Synthetic oligonucleotide
gguacaacuuccuucucucuu

SEQ ID NO: 845 - RNA, 21 nt, Artificial Sequence
  Description of Artificial Sequence: Synthetic oligonucleotide
agagaaggaaguuguaccggu

SEQ ID NO: 846 - RNA, 21 nt, Artificial Sequence
  Description of Artificial Sequence: Synthetic oligonucleotide
cgguacaacuuccuucucucu

SEQ ID NO: 847 - RNA, 21 nt, Artificial Sequence
  Description of Artificial Sequence: Synthetic oligonucleotide
gagaaggaaguuguaccggug

SEQ ID NO: 848 - RNA, 21 nt, Artificial Sequence
  Description of Artificial Sequence: Synthetic oligonucleotide
ccgguacaacuuccuucucuc

SEQ ID NO: 849 - RNA, 21 nt, Artificial Sequence
  Description of Artificial Sequence: Synthetic oligonucleotide
agaaggaaguuguaccggugg

SEQ ID NO: 850 - RNA, 21 nt, Artificial Sequence
  Description of Artificial Sequence: Synthetic oligonucleotide
accgguacaacuuccuucucu

SEQ ID NO: 851 - RNA, 21 nt, Artificial Sequence
  Description of Artificial Sequence: Synthetic oligonucleotide
gaaggaaguuguaccgguggg

SEQ ID NO: 852 - RNA, 21 nt, Artificial Sequence
  Description of Artificial Sequence: Synthetic oligonucleotide
caccgguacaacuuccuucuc

SEQ ID NO: 853 - RNA, 21 nt, Artificial Sequence
  Description of Artificial Sequence: Synthetic oligonucleotide
aaggaaguuguaccggugggg

SEQ ID NO: 854 - RNA, 21 nt, Artificial Sequence
  Description of Artificial Sequence: Synthetic oligonucleotide
ccaccgguacaacuuccuucu

SEQ ID NO: 855 - RNA, 21 nt, Artificial Sequence
  Description of Artificial Sequence: Synthetic oligonucleotide
aggaaguuguaccggugggga

SEQ ID NO: 856 - RNA, 21 nt, Artificial Sequence
  Description of Artificial Sequence: Synthetic oligonucleotide
cccaccgguacaacuuccuuc

SEQ ID NO: 857 - RNA, 21 nt, Artificial Sequence
  Description of Artificial Sequence: Synthetic oligonucleotide
ggaaguuguaccgguggggaa

SEQ ID NO: 858 - RNA, 21 nt, Artificial Sequence
  Description of Artificial Sequence: Synthetic oligonucleotide
ccccaccgguacaacuuccuu

SEQ ID NO: 859 - RNA, 21 nt, Artificial Sequence
  Description of Artificial Sequence: Synthetic oligonucleotide
gaaguuguaccgguggggaaa

SEQ ID NO: 860 - RNA, 21 nt, Artificial Sequence
  Description of Artificial Sequence: Synthetic oligonucleotide
uccccaccgguacaacuuccu

SEQ ID NO: 861 - RNA, 21 nt, Artificial Sequence
  Description of Artificial Sequence: Synthetic oligonucleotide
aaguuguaccgguggggaaac

SEQ ID NO: 862 - RNA, 21 nt, Artificial Sequence
  Description of Artificial Sequence: Synthetic oligonucleotide
uuccccaccgguacaacuucc

SEQ ID NO: 863 - RNA, 21 nt, Artificial Sequence
  Description of Artificial Sequence: Synthetic oligonucleotide
aguuguaccgguggggaaacu

SEQ ID NO: 864 - RNA, 21 nt, Artificial Sequence
  Description of Artificial Sequence: Synthetic oligonucleotide
uuuccccaccgguacaacuuc

SEQ ID NO: 865 - RNA, 21 nt, Artificial Sequence
  Description of Artificial Sequence: Synthetic oligonucleotide
guuguaccgguggggaaacug

SEQ ID NO: 866 - RNA, 21 nt, Artificial Sequence
  Description of Artificial Sequence: Synthetic oligonucleotide
guuuccccaccgguacaacuu

SEQ ID NO: 867 - RNA, 21 nt, Artificial Sequence
  Description of Artificial Sequence: Synthetic oligonucleotide
uuguaccgguggggaaacugg

SEQ ID NO: 868 - RNA, 21 nt, Artificial Sequence
  Description of Artificial Sequence: Synthetic oligonucleotide
aguuuccccaccgguacaacu

SEQ ID NO: 869 - RNA, 21 nt, Artificial Sequence
  Description of Artificial Sequence: Synthetic oligonucleotide
uguaccgguggggaaacugga

SEQ ID NO: 870 - RNA, 21 nt, Artificial Sequence
  Description of Artificial Sequence: Synthetic oligonucleotide
caguuuccccaccgguacaac

SEQ ID NO: 871 - RNA, 21 nt, Artificial Sequence
  Description of Artificial Sequence: Synthetic oligonucleotide
guaccgguggggaaacuggaa

SEQ ID NO: 872 - RNA, 21 nt, Artificial Sequence
  Description of Artificial Sequence: Synthetic oligonucleotide
ccaguuuccccaccgguacaa

SEQ ID NO: 873 - RNA, 21 nt, Artificial Sequence
  Description of Artificial Sequence: Synthetic oligonucleotide
uaccgguggggaaacuggaag

SEQ ID NO: 874 - RNA, 21 nt, Artificial Sequence
  Description of Artificial Sequence: Synthetic oligonucleotide
uccaguuuccccaccgguaca

SEQ ID NO: 875 - RNA, 21 nt, Artificial Sequence
  Description of Artificial Sequence: Synthetic oligonucleotide
accgguggggaaacuggaagg

SEQ ID NO: 876 - RNA, 21 nt, Artificial Sequence
  Description of Artificial Sequence: Synthetic oligonucleotide
uuccaguuuccccaccgguac

SEQ ID NO: 877 - RNA, 21 nt, Artificial Sequence
  Description of Artificial Sequence: Synthetic oligonucleotide
ccgguggggaaacuggaagga

SEQ ID NO: 878 - RNA, 21 nt, Artificial Sequence
  Description of Artificial Sequence: Synthetic oligonucleotide
cuuccaguuuccccaccggua

SEQ ID NO: 879 - RNA, 21 nt, Artificial Sequence
  Description of Artificial Sequence: Synthetic oligonucleotide
cgguggggaaacuggaaggac

SEQ ID NO: 880 - RNA, 21 nt, Artificial Sequence
  Description of Artificial Sequence: Synthetic oligonucleotide
ccuuccaguuuccccaccggu

SEQ ID NO: 881 - RNA, 21 nt, Artificial Sequence
  Description of Artificial Sequence: Synthetic oligonucleotide
gguggggaaacuggaaggacg

SEQ ID NO: 882 - RNA, 21 nt, Artificial Sequence
  Description of Artificial Sequence: Synthetic oligonucleotide
uccuuccaguuuccccaccgg

SEQ ID NO: 883 - RNA, 21 nt, Artificial Sequence
  Description of Artificial Sequence: Synthetic oligonucleotide
guggggaaacuggaaggacgg

SEQ ID NO: 884 - RNA, 21 nt, Artificial Sequence
  Description of Artificial Sequence: Synthetic oligonucleotide
guccuuccaguuuccccaccg

SEQ ID NO: 885 - RNA, 21 nt, Artificial Sequence
  Description of Artificial Sequence: Synthetic oligonucleotide
uggggaaacuggaaggacggg

SEQ ID NO: 886 - RNA, 21 nt, Artificial Sequence
  Description of Artificial Sequence: Synthetic oligonucleotide
cguccuuccaguuuccccacc

SEQ ID NO: 887 - RNA, 21 nt, Artificial Sequence
  Description of Artificial Sequence: Synthetic oligonucleotide
ggggaaacuggaaggacgggu

SEQ ID NO: 888 - RNA, 21 nt, Artificial Sequence
  Description of Artificial Sequence: Synthetic oligonucleotide
ccguccuuccaguuuccccac

SEQ ID NO: 889 - RNA, 21 nt, Artificial Sequence
  Description of Artificial Sequence: Synthetic oligonucleotide
gggaaacuggaaggacggguu

SEQ ID NO: 890 - RNA, 21 nt, Artificial Sequence
  Description of Artificial Sequence: Synthetic oligonucleotide
cccguccuuccaguuucccca

SEQ ID NO: 891 - RNA, 21 nt, Artificial Sequence
  Description of Artificial Sequence: Synthetic oligonucleotide
ggaaacuggaaggacggguua

SEQ ID NO: 892 - RNA, 21 nt, Artificial Sequence
  Description of Artificial Sequence: Synthetic oligonucleotide
acccguccuuccaguuucccc

SEQ ID NO: 893 - RNA, 21 nt, Artificial Sequence
  Description of Artificial Sequence: Synthetic oligonucleotide
gaaacuggaaggacggguuaa

SEQ ID NO: 894 - RNA, 21 nt, Artificial Sequence
  Description of Artificial Sequence: Synthetic oligonucleotide
aacccguccuuccaguuuccc

SEQ ID NO: 895 - RNA, 21 nt, Artificial Sequence
  Description of Artificial Sequence: Synthetic oligonucleotide
aaacuggaaggacggguuaau

SEQ ID NO: 896 - RNA, 21 nt, Artificial Sequence
  Description of Artificial Sequence: Synthetic oligonucleotide
uaacccguccuuccaguuucc

SEQ ID NO: 897 - RNA, 21 nt, Artificial Sequence
  Description of Artificial Sequence: Synthetic oligonucleotide
aacuggaaggacggguuaauu

SEQ ID NO: 898 - RNA, 21 nt, Artificial Sequence
  Description of Artificial Sequence: Synthetic oligonucleotide
uuaacccguccuuccaguuuc

SEQ ID NO: 899 - RNA, 21 nt, Artificial Sequence
  Description of Artificial Sequence: Synthetic oligonucleotide
acuggaaggacggguuaauuc

SEQ ID NO: 900 - RNA, 21 nt, Artificial Sequence
  Description of Artificial Sequence: Synthetic oligonucleotide
auuaacccguccuuccaguuu

SEQ ID NO: 901 - RNA, 21 nt, Artificial Sequence
  Description of Artificial Sequence: Synthetic oligonucleotide
cuggaaggacggguuaauucu

SEQ ID NO: 902 - RNA, 21 nt, Artificial Sequence
  Description of Artificial Sequence: Synthetic oligonucleotide
aauuaacccguccuuccaguu

SEQ ID NO: 903 - RNA, 21 nt, Artificial Sequence
  Description of Artificial Sequence: Synthetic oligonucleotide
uggaaggacggguuaauucug

SEQ ID NO: 904 - RNA, 21 nt, Artificial Sequence
  Description of Artificial Sequence: Synthetic oligonucleotide
gaauuaacccguccuuccagu

SEQ ID NO: 905 - RNA, 21 nt, Artificial Sequence
  Description of Artificial Sequence: Synthetic oligonucleotide
ggaaggacggguuaauucuga

SEQ ID NO: 906 - RNA, 21 nt, Artificial Sequence
  Description of Artificial Sequence: Synthetic oligonucleotide
agaauuaacccguccuuccag

SEQ ID NO: 907 - RNA, 21 nt, Artificial Sequence
  Description of Artificial Sequence: Synthetic oligonucleotide
gaaggacggguuaauucugaa

SEQ ID NO: 908 - RNA, 21 nt, Artificial Sequence
  Description of Artificial Sequence: Synthetic oligonucleotide
cagaauuaacccguccuucca

SEQ ID NO: 909 - RNA, 21 nt, Artificial Sequence
  Description of Artificial Sequence: Synthetic oligonucleotide
aaggacggguuaauucugaau

SEQ ID NO: 910 - RNA, 21 nt, Artificial Sequence
  Description of Artificial Sequence: Synthetic oligonucleotide
ucagaauuaacccguccuucc

SEQ ID NO: 911 - RNA, 21 nt, Artificial Sequence
  Description of Artificial Sequence: Synthetic oligonucleotide
aggacggguuaauucugaaua

SEQ ID NO: 912 - RNA, 21 nt, Artificial Sequence
  Description of Artificial Sequence: Synthetic oligonucleotide
uucagaauuaacccguccuuc

SEQ ID NO: 913 - RNA, 21 nt, Artificial Sequence
  Description of Artificial Sequence: Synthetic oligonucleotide
ggacggguuaauucugaauau

SEQ ID NO: 914 - RNA, 21 nt, Artificial Sequence
  Description of Artificial Sequence: Synthetic oligonucleotide
auucagaauuaacccguccuu

SEQ ID NO: 915 - RNA, 21 nt, Artificial Sequence
  Description of Artificial Sequence: Synthetic oligonucleotide
gacggguuaauucugaauaug

SEQ ID NO: 916 - RNA, 21 nt, Artificial Sequence
  Description of Artificial Sequence: Synthetic oligonucleotide
uauucagaauuaacccguccu

SEQ ID NO: 917 - RNA, 21 nt, Artificial Sequence
  Description of Artificial Sequence: Synthetic oligonucleotide
acggguuaauucugaauaugg

SEQ ID NO: 918 - RNA, 21 nt, Artificial Sequence
  Description of Artificial Sequence: Synthetic oligonucleotide
auauucagaauuaacccgucc

SEQ ID NO: 919 - RNA, 21 nt, Artificial Sequence
  Description of Artificial Sequence: Synthetic oligonucleotide
cggguuaauucugaauauggc

SEQ ID NO: 920 - RNA, 21 nt, Artificial Sequence
  Description of Artificial Sequence: Synthetic oligonucleotide
cauauucagaauuaacccguc

SEQ ID NO: 921 - RNA, 21 nt, Artificial Sequence
  Description of Artificial Sequence: Synthetic oligonucleotide
ggguuaauucugaauauggcu

SEQ ID NO: 922 - RNA, 21 nt, Artificial Sequence
  Description of Artificial Sequence: Synthetic oligonucleotide
ccauauucagaauuaacccgu

SEQ ID NO: 923 - RNA, 21 nt, Artificial Sequence
  Description of Artificial Sequence: Synthetic oligonucleotide
gguuaauucugaauauggcug

SEQ ID NO: 924 - RNA, 21 nt, Artificial Sequence
  Description of Artificial Sequence: Synthetic oligonucleotide
gccauauucagaauuaacccg

SEQ ID NO: 925 - RNA, 21 nt, Artificial Sequence
  Description of Artificial Sequence: Synthetic oligonucleotide
guuaauucugaauauggcugg

SEQ ID NO: 926 - RNA, 21 nt, Artificial Sequence
  Description of Artificial Sequence: Synthetic oligonucleotide
agccauauucagaauuaaccc

SEQ ID NO: 927 - RNA, 21 nt, Artificial Sequence
  Description of Artificial Sequence: Synthetic oligonucleotide
uuaauucugaauauggcuggg

SEQ ID NO: 928 - RNA, 21 nt, Artificial Sequence
  Description of Artificial Sequence: Synthetic oligonucleotide
cagccauauucagaauuaacc

SEQ ID NO: 929 - RNA, 21 nt, Artificial Sequence
  Description of Artificial Sequence: Synthetic oligonucleotide
uaauucugaauauggcugggg

SEQ ID NO: 930 - RNA, 21 nt, Artificial Sequence
  Description of Artificial Sequence: Synthetic oligonucleotide
ccagccauauucagaauuaac

SEQ ID NO: 931 - RNA, 21 nt, Artificial Sequence
  Description of Artificial Sequence: Synthetic oligonucleotide
aauucugaauauggcuggggc

SEQ ID NO: 932 - RNA, 21 nt, Artificial Sequence
  Description of Artificial Sequence: Synthetic oligonucleotide
cccagccauauucagaauuaa

SEQ ID NO: 933 - RNA, 21 nt, Artificial Sequence
  Description of Artificial Sequence: Synthetic oligonucleotide
auucugaauauggcuggggcc

SEQ ID NO: 934 - RNA, 21 nt, Artificial Sequence
  Description of Artificial Sequence: Synthetic oligonucleotide
ccccagccauauucagaauua

SEQ ID NO: 935 - RNA, 21 nt, Artificial Sequence
  Description of Artificial Sequence: Synthetic oligonucleotide
uucugaauauggcuggggcca

SEQ ID NO: 936 - RNA, 21 nt, Artificial Sequence
  Description of Artificial Sequence: Synthetic oligonucleotide
gccccagccauauucagaauu

SEQ ID NO: 937 - RNA, 21 nt, Artificial Sequence
  Description of Artificial Sequence: Synthetic oligonucleotide
ucugaauauggcuggggccaa

SEQ ID NO: 938 - RNA, 21 nt, Artificial Sequence
  Description of Artificial Sequence: Synthetic oligonucleotide
ggccccagccauauucagaau

SEQ ID NO: 939 - RNA, 21 nt, Artificial Sequence
  Description of Artificial Sequence: Synthetic oligonucleotide
cugaauauggcuggggccaaa

SEQ ID NO: 940 - RNA, 21 nt, Artificial Sequence
  Description of Artificial Sequence: Synthetic oligonucleotide
uggccccagccauauucagaa

SEQ ID NO: 941 - RNA, 21 nt, Artificial Sequence
  Description of Artificial Sequence: Synthetic oligonucleotide
ugaauauggcuggggccaaac

SEQ ID NO: 942 - RNA, 21 nt, Artificial Sequence
  Description of Artificial Sequence: Synthetic oligonucleotide
uuggccccagccauauucaga

SEQ ID NO: 943 - RNA, 21 nt, Artificial Sequence
  Description of Artificial Sequence: Synthetic oligonucleotide
gaauauggcuggggccaaacu

SEQ ID NO: 944 - RNA, 21 nt, Artificial Sequence
  Description of Artificial Sequence: Synthetic oligonucleotide
uuuggccccagccauauucag

SEQ ID NO: 945 - RNA, 21 nt, Artificial Sequence
  Description of Artificial Sequence: Synthetic oligonucleotide
aauauggcuggggccaaacua

SEQ ID NO: 946 - RNA, 21 nt, Artificial Sequence
  Description of Artificial Sequence: Synthetic oligonucleotide
guuuggccccagccauauuca

SEQ ID NO: 947 - RNA, 21 nt, Artificial Sequence
  Description of Artificial Sequence: Synthetic oligonucleotide
auauggcuggggccaaacuau

SEQ ID NO: 948 - RNA, 21 nt, Artificial Sequence
  Description of Artificial Sequence: Synthetic oligonucleotide
aguuuggccccagccauauuc

SEQ ID NO: 949 - RNA, 21 nt, Artificial Sequence
  Description of Artificial Sequence: Synthetic oligonucleotide
uauggcuggggccaaacuaua

SEQ ID NO: 950 - RNA, 21 nt, Artificial Sequence
  Description of Artificial Sequence: Synthetic oligonucleotide
uaguuuggccccagccauauu

SEQ ID NO: 951 - RNA, 21 nt, Artificial Sequence
  Description of Artificial Sequence: Synthetic oligonucleotide
auggcuggggccaaacuauau

SEQ ID NO: 952 - RNA, 21 nt, Artificial Sequence
  Description of Artificial Sequence: Synthetic oligonucleotide
auaguuuggccccagccauau

SEQ ID NO: 953 - RNA, 21 nt, Artificial Sequence
  Description of Artificial Sequence: Synthetic oligonucleotide
uggcuggggccaaacuauaug

SEQ ID NO: 954 - RNA, 21 nt, Artificial Sequence
  Description of Artificial Sequence: Synthetic oligonucleotide
uauaguuuggccccagccaua

SEQ ID NO: 955 - RNA, 21 nt, Artificial Sequence
  Description of Artificial Sequence: Synthetic oligonucleotide
ggcuggggccaaacuauauga

SEQ ID NO: 956 - RNA, 21 nt, Artificial Sequence
  Description of Artificial Sequence: Synthetic oligonucleotide
auauaguuuggccccagccau

SEQ ID NO: 957 - RNA, 21 nt, Artificial Sequence
  Description of Artificial Sequence: Synthetic oligonucleotide
gcuggggccaaacuauaugac

SEQ ID NO: 958 - RNA, 21 nt, Artificial Sequence
  Description of Artificial Sequence: Synthetic oligonucleotide
cauauaguuuggccccagcca

SEQ ID NO: 959 - RNA, 21 nt, Artificial Sequence
  Description of Artificial Sequence: Synthetic oligonucleotide
cuggggccaaacuauaugacc

SEQ ID NO: 960 - RNA, 21 nt, Artificial Sequence
  Description of Artificial Sequence: Synthetic oligonucleotide
ucauauaguuuggccccagcc

SEQ ID NO: 961 - RNA, 21 nt, Artificial Sequence
  Description of Artificial Sequence: Synthetic oligonucleotide
uggggccaaacuauaugaccu

SEQ ID NO: 962 - RNA, 21 nt, Artificial Sequence
  Description of Artificial Sequence: Synthetic oligonucleotide
gucauauaguuuggccccagc

SEQ ID NO: 963 - RNA, 21 nt, Artificial Sequence
  Description of Artificial Sequence: Synthetic oligonucleotide
ggggccaaacuauaugaccuc

SEQ ID NO: 964 - RNA, 21 nt, Artificial Sequence
  Description of Artificial Sequence: Synthetic oligonucleotide
ggucauauaguuuggccccag

SEQ ID NO: 965 - RNA, 21 nt, Artificial Sequence
  Description of Artificial Sequence: Synthetic oligonucleotide
gggccaaacuauaugaccucc

SEQ ID NO: 966 - RNA, 21 nt, Artificial Sequence
  Description of Artificial Sequence: Synthetic oligonucleotide
aggucauauaguuuggcccca

SEQ ID NO: 967 - RNA, 21 nt, Artificial Sequence
  Description of Artificial Sequence: Synthetic oligonucleotide
ggccaaacuauaugaccuccc

SEQ ID NO: 968 - RNA, 21 nt, Artificial Sequence
  Description of Artificial Sequence: Synthetic oligonucleotide
gaggucauauaguuuggcccc

SEQ ID NO: 969 - RNA, 21 nt, Artificial Sequence
  Description of Artificial Sequence: Synthetic oligonucleotide
gccaaacuauaugaccucccu

SEQ ID NO: 970 - RNA, 21 nt, Artificial Sequence
  Description of Artificial Sequence: Synthetic oligonucleotide
ggaggucauauaguuuggccc

SEQ ID NO: 971 - RNA, 21 nt, Artificial Sequence
  Description of Artificial Sequence: Synthetic oligonucleotide
ccaaacuauaugaccucccug

SEQ ID NO: 972 - RNA, 21 nt, Artificial Sequence
  Description of Artificial Sequence: Synthetic oligonucleotide
gggaggucauauaguuuggcc

SEQ ID NO: 973 - RNA, 21 nt, Artificial Sequence
  Description of Artificial Sequence: Synthetic oligonucleotide
caaacuauaugaccucccugu

SEQ ID NO: 974 - RNA, 21 nt, Artificial Sequence
  Description of Artificial Sequence: Synthetic oligonucleotide
agggaggucauauaguuuggc

SEQ ID NO: 975 - RNA, 21 nt, Artificial Sequence
  Description of Artificial Sequence: Synthetic oligonucleotide
aaacuauaugaccucccugug

SEQ ID NO: 976 - RNA, 21 nt, Artificial Sequence
  Description of Artificial Sequence: Synthetic oligonucleotide
cagggaggucauauaguuugg

SEQ ID NO: 977 - RNA, 21 nt, Artificial Sequence
  Description of Artificial Sequence: Synthetic oligonucleotide
aacuauaugaccucccugugg

SEQ ID NO: 978 - RNA, 21 nt, Artificial Sequence
  Description of Artificial Sequence: Synthetic oligonucleotide
acagggaggucauauaguuug

SEQ ID NO: 979 - RNA, 21 nt, Artificial Sequence
  Description of Artificial Sequence: Synthetic oligonucleotide
acuauaugaccucccugugga

SEQ ID NO: 980 - RNA, 21 nt, Artificial Sequence
  Description of Artificial Sequence: Synthetic oligonucleotide
cacagggaggucauauaguuu

SEQ ID NO: 981 - RNA, 21 nt, Artificial Sequence
  Description of Artificial Sequence: Synthetic oligonucleotide
cuauaugaccucccuguggau

SEQ ID NO: 982 - RNA, 21 nt, Artificial Sequence
  Description of Artificial Sequence: Synthetic oligonucleotide
ccacagggaggucauauaguu

SEQ ID NO: 983 - RNA, 21 nt, Artificial Sequence
  Description of Artificial Sequence: Synthetic oligonucleotide
uauaugaccucccuguggaug

SEQ ID NO: 984 - RNA, 21 nt, Artificial Sequence
  Description of Artificial Sequence: Synthetic oligonucleotide
uccacagggaggucauauagu

SEQ ID NO: 985 - RNA, 21 nt, Artificial Sequence
  Description of Artificial Sequence: Synthetic oligonucleotide
auaugaccucccuguggauga

SEQ ID NO: 986 - RNA, 21 nt, Artificial Sequence
  Description of Artificial Sequence: Synthetic oligonucleotide
auccacagggaggucauauag

SEQ ID NO: 987 - RNA, 21 nt, Artificial Sequence
  Description of Artificial Sequence: Synthetic oligonucleotide
uaugaccucccuguggaugag

SEQ ID NO: 988 - RNA, 21 nt, Artificial Sequence
  Description of Artificial Sequence: Synthetic oligonucleotide
cauccacagggaggucauaua

SEQ ID NO: 989 - RNA, 21 nt, Artificial Sequence
  Description of Artificial Sequence: Synthetic oligonucleotide
augaccucccuguggaugagc

SEQ ID NO: 990 - RNA, 21 nt, Artificial Sequence
  Description of Artificial Sequence: Synthetic oligonucleotide
ucauccacagggaggucauau

SEQ ID NO: 991 - RNA, 21 nt, Artificial Sequence
  Description of Artificial Sequence: Synthetic oligonucleotide
ugaccucccuguggaugagcg

SEQ ID NO: 992 - RNA, 21 nt, Artificial Sequence
  Description of Artificial Sequence: Synthetic oligonucleotide
cucauccacagggaggucaua

SEQ ID NO: 993 - RNA, 21 nt, Artificial Sequence
  Description of Artificial Sequence: Synthetic oligonucleotide
gaccucccuguggaugagcga

SEQ ID NO: 994 - RNA, 21 nt, Artificial Sequence
  Description of Artificial Sequence: Synthetic oligonucleotide
gcucauccacagggaggucau

SEQ ID NO: 995 - RNA, 21 nt, Artificial Sequence
  Description of Artificial Sequence: Synthetic oligonucleotide
accucccuguggaugagcgau

SEQ ID NO: 996 - RNA, 21 nt, Artificial Sequence
  Description of Artificial Sequence: Synthetic oligonucleotide
cgcucauccacagggagguca

SEQ ID NO: 997 - RNA, 21 nt, Artificial Sequence
  Description of Artificial Sequence: Synthetic oligonucleotide
ccucccuguggaugagcgauu

SEQ ID NO: 998 - RNA, 21 nt, Artificial Sequence
  Description of Artificial Sequence: Synthetic oligonucleotide
ucgcucauccacagggagguc

SEQ ID NO: 999 - RNA, 21 nt, Artificial Sequence
  Description of Artificial Sequence: Synthetic oligonucleotide
cucccuguggaugagcgauuu

SEQ ID NO: 1000 - RNA, 21 nt, Artificial Sequence
  Description of Artificial Sequence: Synthetic oligonucleotide
aucgcucauccacagggaggu

SEQ ID NO: 1001 - RNA, 21 nt, Artificial Sequence
  Description of Artificial Sequence: Synthetic oligonucleotide
ucccuguggaugagcgauuuc

SEQ ID NO: 1002 - RNA, 21 nt, Artificial Sequence
  Description of Artificial Sequence: Synthetic oligonucleotide
aaucgcucauccacagggagg

SEQ ID NO: 1003 - RNA, 21 nt, Artificial Sequence
  Description of Artificial Sequence: Synthetic oligonucleotide
cccuguggaugagcgauuucu

SEQ ID NO: 1004 - RNA, 21 nt, Artificial Sequence
  Description of Artificial Sequence: Synthetic oligonucleotide
aaaucgcucauccacagggag

SEQ ID NO: 1005 - RNA, 21 nt, Artificial Sequence
  Description of Artificial Sequence: Synthetic oligonucleotide
ccuguggaugagcgauuucug

SEQ ID NO: 1006 - RNA, 21 nt, Artificial Sequence
  Description of Artificial Sequence: Synthetic oligonucleotide
gaaaucgcucauccacaggga

SEQ ID NO: 1007 - RNA, 21 nt, Artificial Sequence
  Description of Artificial Sequence: Synthetic oligonucleotide
cuguggaugagcgauuucugg

SEQ ID NO: 1008 - RNA, 21 nt, Artificial Sequence
  Description of Artificial Sequence: Synthetic oligonucleotide
agaaaucgcucauccacaggg

SEQ ID NO: 1009 - RNA, 21 nt, Artificial Sequence
  Description of Artificial Sequence: Synthetic oligonucleotide
uguggaugagcgauuucugga

SEQ ID NO: 1010 - RNA, 21 nt, Artificial Sequence
  Description of Artificial Sequence: Synthetic oligonucleotide
cagaaaucgcucauccacagg

SEQ ID NO: 1011 - RNA, 21 nt, Artificial Sequence
  Description of Artificial Sequence: Synthetic oligonucleotide
guggaugagcgauuucuggaa

SEQ ID NO: 1012 - RNA, 21 nt, Artificial Sequence
  Description of Artificial Sequence: Synthetic oligonucleotide
ccagaaaucgcucauccacag

SEQ ID NO: 1013 - RNA, 21 nt, Artificial Sequence
  Description of Artificial Sequence: Synthetic oligonucleotide
uggaugagcgauuucuggaag

SEQ ID NO: 1014 - RNA, 21 nt, Artificial Sequence
  Description of Artificial Sequence: Synthetic oligonucleotide
uccagaaaucgcucauccaca

SEQ ID NO: 1015 - RNA, 21 nt, Artificial Sequence
  Description of Artificial Sequence: Synthetic oligonucleotide
ggaugagcgauuucuggaaga

SEQ ID NO: 1016 - RNA, 21 nt, Artificial Sequence
  Description of Artificial Sequence: Synthetic oligonucleotide
uuccagaaaucgcucauccac

SEQ ID NO: 1017 - RNA, 21 nt, Artificial Sequence
  Description of Artificial Sequence: Synthetic oligonucleotide
gaugagcgauuucuggaagac

SEQ ID NO: 1018 - RNA, 21 nt, Artificial Sequence
  Description of Artificial Sequence: Synthetic oligonucleotide
cuuccagaaaucgcucaucca

SEQ ID NO: 1019 - RNA, 21 nt, Artificial Sequence
  Description of Artificial Sequence: Synthetic oligonucleotide
augagcgauuucuggaagaca

SEQ ID NO: 1020 - RNA, 21 nt, Artificial Sequence
  Description of Artificial Sequence: Synthetic oligonucleotide
ucuuccagaaaucgcucaucc

SEQ ID NO: 1021 - RNA, 21 nt, Artificial Sequence
  Description of Artificial Sequence: Synthetic oligonucleotide
ugagcgauuucuggaagacaa

SEQ ID NO: 1022 - RNA, 21 nt, Artificial Sequence
  Description of Artificial Sequence: Synthetic oligonucleotide
gucuuccagaaaucgcucauc

SEQ ID NO: 1023 - RNA, 21 nt, Artificial Sequence
  Description of Artificial Sequence: Synthetic oligonucleotide
gagcgauuucuggaagacaag

SEQ ID NO: 1024 - RNA, 21 nt, Artificial Sequence
  Description of Artificial Sequence: Synthetic oligonucleotide
ugucuuccagaaaucgcucau

SEQ ID NO: 1025 - RNA, 21 nt, Artificial Sequence
  Description of Artificial Sequence: Synthetic oligonucleotide
agcgauuucuggaagacaaga

SEQ ID NO: 1026 - RNA, 21 nt, Artificial Sequence
  Description of Artificial Sequence: Synthetic oligonucleotide
uugucuuccagaaaucgcuca

SEQ ID NO: 1027 - RNA, 21 nt, Artificial Sequence
  Description of Artificial Sequence: Synthetic oligonucleotide
gcgauuucuggaagacaagag

SEQ ID NO: 1028 - RNA, 21 nt, Artificial Sequence
  Description of Artificial Sequence: Synthetic oligonucleotide
cuugucuuccagaaaucgcuc

SEQ ID NO: 1029 - RNA, 21 nt, Artificial Sequence
  Description of Artificial Sequence: Synthetic oligonucleotide
cgauuucuggaagacaagaga

SEQ ID NO: 1030 - RNA, 21 nt, Artificial Sequence
  Description of Artificial Sequence: Synthetic oligonucleotide
ucuugucuuccagaaaucgcu

SEQ ID NO: 1031 - RNA, 21 nt, Artificial Sequence
  Description of Artificial Sequence: Synthetic oligonucleotide
gauuucuggaagacaagagag

SEQ ID NO: 1032 - RNA, 21 nt, Artificial Sequence
  Description of Artificial Sequence: Synthetic oligonucleotide
cucuugucuuccagaaaucgc

SEQ ID NO: 1033 - RNA, 21 nt, Artificial Sequence
  Description of Artificial Sequence: Synthetic oligonucleotide
auuucuggaagacaagagagu

SEQ ID NO: 1034 - RNA, 21 nt, Artificial Sequence
  Description of Artificial Sequence: Synthetic oligonucleotide
ucucuugucuuccagaaaucg

SEQ ID NO: 1035 - RNA, 21 nt, Artificial Sequence
  Description of Artificial Sequence: Synthetic oligonucleotide
uuucuggaagacaagagaguu

SEQ ID NO: 1036 - RNA, 21 nt, Artificial Sequence
  Description of Artificial Sequence: Synthetic oligonucleotide
cucucuugucuuccagaaauc

SEQ ID NO: 1037 - RNA, 21 nt, Artificial Sequence
  Description of Artificial Sequence: Synthetic oligonucleotide
uucuggaagacaagagaguug

SEQ ID NO: 1038 - RNA, 21 nt, Artificial Sequence
  Description of Artificial Sequence: Synthetic oligonucleotide
acucucuugucuuccagaaau

SEQ ID NO: 1039 - RNA, 21 nt, Artificial Sequence
  Description of Artificial Sequence: Synthetic oligonucleotide
ucuggaagacaagagaguuga

SEQ ID NO: 1040 - RNA, 21 nt, Artificial Sequence
  Description of Artificial Sequence: Synthetic oligonucleotide
aacucucuugucuuccagaaa

SEQ ID NO: 1041 - RNA, 21 nt, Artificial Sequence
  Description of Artificial Sequence: Synthetic oligonucleotide
cuggaagacaagagaguugac

SEQ ID NO: 1042 - RNA, 21 nt, Artificial Sequence
  Description of Artificial Sequence: Synthetic oligonucleotide
caacucucuugucuuccagaa

SEQ ID NO: 1043 - RNA, 21 nt, Artificial Sequence
  Description of Artificial Sequence: Synthetic oligonucleotide
uggaagacaagagaguugacu

SEQ ID NO: 1044 - RNA, 21 nt, Artificial Sequence
  Description of Artificial Sequence: Synthetic oligonucleotide
ucaacucucuugucuuccaga

SEQ ID NO: 1045 - RNA, 21 nt, Artificial Sequence
  Description of Artificial Sequence: Synthetic oligonucleotide
ggaagacaagagaguugacuu

SEQ ID NO: 1046 - RNA, 21 nt, Artificial Sequence
  Description of Artificial Sequence: Synthetic oligonucleotide
gucaacucucuugucuuccag

SEQ ID NO: 1047 - RNA, 21 nt, Artificial Sequence
  Description of Artificial Sequence: Synthetic oligonucleotide
gaagacaagagaguugacuuu

SEQ ID NO: 1048 - RNA, 21 nt, Artificial Sequence
  Description of Artificial Sequence: Synthetic oligonucleotide
agucaacucucuugucuucca

SEQ ID NO: 1049 - RNA, 21 nt, Artificial Sequence
  Description of Artificial Sequence: Synthetic oligonucleotide
aagacaagagaguugacuuug

SEQ ID NO: 1050 - RNA, 21 nt, Artificial Sequence
  Description of Artificial Sequence: Synthetic oligonucleotide
aagucaacucucuugucuucc

SEQ ID NO: 1051 - RNA, 21 nt, Artificial Sequence
  Description of Artificial Sequence: Synthetic oligonucleotide
agacaagagaguugacuuuga

SEQ ID NO: 1052 - RNA, 21 nt, Artificial Sequence
  Description of Artificial Sequence: Synthetic oligonucleotide
aaagucaacucucuugucuuc

SEQ ID NO: 1053 - RNA, 21 nt, Artificial Sequence
  Description of Artificial Sequence: Synthetic oligonucleotide
gacaagagaguugacuuugag

SEQ ID NO: 1054 - RNA, 21 nt, Artificial Sequence
  Description of Artificial Sequence: Synthetic oligonucleotide
caaagucaacucucuugucuu

SEQ ID NO: 1055 - RNA, 21 nt, Artificial Sequence
  Description of Artificial Sequence: Synthetic oligonucleotide
acaagagaguugacuuugagg

SEQ ID NO: 1056 - RNA, 21 nt, Artificial Sequence
  Description of Artificial Sequence: Synthetic oligonucleotide
ucaaagucaacucucuugucu

SEQ ID NO: 1057 - RNA, 21 nt, Artificial Sequence
  Description of Artificial Sequence: Synthetic oligonucleotide
caagagaguugacuuugaggu

SEQ ID NO: 1058 - RNA, 21 nt, Artificial Sequence
  Description of Artificial Sequence: Synthetic oligonucleotide
cucaaagucaacucucuuguc

SEQ ID NO: 1059 - RNA, 21 nt, Artificial Sequence
  Description of Artificial Sequence: Synthetic oligonucleotide
aagagaguugacuuugagguu

SEQ ID NO: 1060 - RNA, 21 nt, Artificial Sequence
  Description of Artificial Sequence: Synthetic oligonucleotide
ccucaaagucaacucucuugu

SEQ ID NO: 1061 - RNA, 21 nt, Artificial Sequence
  Description of Artificial Sequence: Synthetic oligonucleotide
agagaguugacuuugagguuu

SEQ ID NO: 1062 - RNA, 21 nt, Artificial Sequence
  Description of Artificial Sequence: Synthetic oligonucleotide
accucaaagucaacucucuug

SEQ ID NO: 1063 - RNA, 21 nt, Artificial Sequence
  Description of Artificial Sequence: Synthetic oligonucleotide
gagaguugacuuugagguuuc

SEQ ID NO: 1064 - RNA, 21 nt, Artificial Sequence
  Description of Artificial Sequence: Synthetic oligonucleotide
aaccucaaagucaacucucuu

SEQ ID NO: 1065 - RNA, 21 nt, Artificial Sequence
  Description of Artificial Sequence: Synthetic oligonucleotide
agaguugacuuugagguuucg

SEQ ID NO: 1066 - RNA, 21 nt, Artificial Sequence
  Description of Artificial Sequence: Synthetic oligonucleotide
aaaccucaaagucaacucucu

SEQ ID NO: 1067 - RNA, 21 nt, Artificial Sequence
  Description of Artificial Sequence: Synthetic oligonucleotide
gaguugacuuugagguuucgc

SEQ ID NO: 1068 - RNA, 21 nt, Artificial Sequence
  Description of Artificial Sequence: Synthetic oligonucleotide
gaaaccucaaagucaacucuc

SEQ ID NO: 1069 - RNA, 21 nt, Artificial Sequence
  Description of Artificial Sequence: Synthetic oligonucleotide
aguugacuuugagguuucgcu

SEQ ID NO: 1070 - RNA, 21 nt, Artificial Sequence
  Description of Artificial Sequence: Synthetic oligonucleotide
cgaaaccucaaagucaacucu

SEQ ID NO: 1071 - RNA, 21 nt, Artificial Sequence
  Description of Artificial Sequence: Synthetic oligonucleotide
guugacuuugagguuucgcug

SEQ ID NO: 1072 - RNA, 21 nt, Artificial Sequence
  Description of Artificial Sequence: Synthetic oligonucleotide
gcgaaaccucaaagucaacuc

SEQ ID NO: 1073 - RNA, 21 nt, Artificial Sequence
  Description of Artificial Sequence: Synthetic oligonucleotide
uugacuuugagguuucgcugg

SEQ ID NO: 1074 - RNA, 21 nt, Artificial Sequence
  Description of Artificial Sequence: Synthetic oligonucleotide
agcgaaaccucaaagucaacu

SEQ ID NO: 1075 - RNA, 21 nt, Artificial Sequence
  Description of Artificial Sequence: Synthetic oligonucleotide
ugacuuugagguuucgcuggc

SEQ ID NO: 1076 - RNA, 21 nt, Artificial Sequence
  Description of Artificial Sequence: Synthetic oligonucleotide
cagcgaaaccucaaagucaac

SEQ ID NO: 1077 - RNA, 21 nt, Artificial Sequence
  Description of Artificial Sequence: Synthetic oligonucleotide
gacuuugagguuucgcuggcc

SEQ ID NO: 1078 - RNA, 21 nt, Artificial Sequence
  Description of Artificial Sequence: Synthetic oligonucleotide
ccagcgaaaccucaaagucaa

SEQ ID NO: 1079 - RNA, 21 nt, Artificial Sequence
  Description of Artificial Sequence: Synthetic oligonucleotide
acuuugagguuucgcuggcca

SEQ ID NO: 1080 - RNA, 21 nt, Artificial Sequence
  Description of Artificial Sequence: Synthetic oligonucleotide
gccagcgaaaccucaaaguca

SEQ ID NO: 1081 - RNA, 21 nt, Artificial Sequence
  Description of Artificial Sequence: Synthetic oligonucleotide
cuuugagguuucgcuggccaa

SEQ ID NO: 1082 - RNA, 21 nt, Artificial Sequence
  Description of Artificial Sequence: Synthetic oligonucleotide
ggccagcgaaaccucaaaguc

SEQ ID NO: 1083 - RNA, 21 nt, Artificial Sequence
  Description of Artificial Sequence: Synthetic oligonucleotide
uuugagguuucgcuggccaag

SEQ ID NO: 1084 - RNA, 21 nt, Artificial Sequence
  Description of Artificial Sequence: Synthetic oligonucleotide
uggccagcgaaaccucaaagu

SEQ ID NO: 1085 - RNA, 21 nt, Artificial Sequence
  Description of Artificial Sequence: Synthetic oligonucleotide
uugagguuucgcuggccaagg

SEQ ID NO: 1086 - RNA, 21 nt, Artificial Sequence
  Description of Artificial Sequence: Synthetic oligonucleotide
uuggccagcgaaaccucaaag

SEQ ID NO: 1087 - RNA, 21 nt, Artificial Sequence
  Description of Artificial Sequence: Synthetic oligonucleotide
ugagguuucgcuggccaaggg

SEQ ID NO: 1088 - RNA, 21 nt, Artificial Sequence
  Description of Artificial Sequence: Synthetic oligonucleotide
cuuggccagcgaaaccucaaa

SEQ ID NO: 1089 - RNA, 21 nt, Artificial Sequence
  Description of Artificial Sequence: Synthetic oligonucleotide
gagguuucgcuggccaagggg

SEQ ID NO: 1090 - RNA, 21 nt, Artificial Sequence
  Description of Artificial Sequence: Synthetic oligonucleotide
ccuuggccagcgaaaccucaa

SEQ ID NO: 1091 - RNA, 21 nt, Artificial Sequence
  Description of Artificial Sequence: Synthetic oligonucleotide
agguuucgcuggccaaggggc

SEQ ID NO: 1092 - RNA, 21 nt, Artificial Sequence
  Description of Artificial Sequence: Synthetic oligonucleotide
cccuuggccagcgaaaccuca

SEQ ID NO: 1093 - RNA, 21 nt, Artificial Sequence
  Description of Artificial Sequence: Synthetic oligonucleotide
gguuucgcuggccaaggggcu

SEQ ID NO: 1094 - RNA, 21 nt, Artificial Sequence
  Description of Artificial Sequence: Synthetic oligonucleotide
ccccuuggccagcgaaaccuc

SEQ ID NO: 1095 - RNA, 21 nt, Artificial Sequence
  Description of Artificial Sequence: Synthetic oligonucleotide
guuucgcuggccaaggggcug

SEQ ID NO: 1096 - RNA, 21 nt, Artificial Sequence
  Description of Artificial Sequence: Synthetic oligonucleotide
gccccuuggccagcgaaaccu

SEQ ID NO: 1097 - RNA, 21 nt, Artificial Sequence
  Description of Artificial Sequence: Synthetic oligonucleotide
uuucgcuggccaaggggcugg

SEQ ID NO: 1098 - RNA, 21 nt, Artificial Sequence
  Description of Artificial Sequence: Synthetic oligonucleotide
agccccuuggccagcgaaacc

SEQ ID NO: 1099 - RNA, 21 nt, Artificial Sequence
  Description of Artificial Sequence: Synthetic oligonucleotide
uucgcuggccaaggggcuggc

SEQ ID NO: 1100 - RNA, 21 nt, Artificial Sequence
  Description of Artificial Sequence: Synthetic oligonucleotide
cagccccuuggccagcgaaac

SEQ ID NO: 1101 - RNA, 21 nt, Artificial Sequence
  Description of Artificial Sequence: Synthetic oligonucleotide
ucgcuggccaaggggcuggcc

SEQ ID NO: 1102 - RNA, 21 nt, Artificial Sequence
  Description of Artificial Sequence: Synthetic oligonucleotide
ccagccccuuggccagcgaaa

SEQ ID NO: 1103 - RNA, 21 nt, Artificial Sequence
  Description of Artificial Sequence: Synthetic oligonucleotide
cgcuggccaaggggcuggccg

SEQ ID NO: 1104 - RNA, 21 nt, Artificial Sequence
  Description of Artificial Sequence: Synthetic oligonucleotide
gccagccccuuggccagcgaa

SEQ ID NO: 1105 - RNA, 21 nt, Artificial Sequence
  Description of Artificial Sequence: Synthetic oligonucleotide
gcuggccaaggggcuggccga

SEQ ID NO: 1106 - RNA, 21 nt, Artificial Sequence
  Description of Artificial Sequence: Synthetic oligonucleotide
ggccagccccuuggccagcga

SEQ ID NO: 1107 - RNA, 21 nt, Artificial Sequence
  Description of Artificial Sequence: Synthetic oligonucleotide
cuggccaaggggcuggccgac

SEQ ID NO: 1108 - RNA, 21 nt, Artificial Sequence
  Description of Artificial Sequence: Synthetic oligonucleotide
cggccagccccuuggccagcg

SEQ ID NO: 1109 - RNA, 21 nt, Artificial Sequence
  Description of Artificial Sequence: Synthetic oligonucleotide
uggccaaggggcuggccgacc

SEQ ID NO: 1110 - RNA, 21 nt, Artificial Sequence
  Description of Artificial Sequence: Synthetic oligonucleotide
ucggccagccccuuggccagc

SEQ ID NO: 1111 - RNA, 21 nt, Artificial Sequence
  Description of Artificial Sequence: Synthetic oligonucleotide
ggccaaggggcuggccgaccu

SEQ ID NO: 1112 - RNA, 21 nt, Artificial Sequence
  Description of Artificial Sequence: Synthetic oligonucleotide
gucggccagccccuuggccag

SEQ ID NO: 1113 - RNA, 21 nt, Artificial Sequence
  Description of Artificial Sequence: Synthetic oligonucleotide
gccaaggggcuggccgaccuc

SEQ ID NO: 1114 - RNA, 21 nt, Artificial Sequence
  Description of Artificial Sequence: Synthetic oligonucleotide
ggucggccagccccuuggcca

SEQ ID NO: 1115 - RNA, 21 nt, Artificial Sequence
  Description of Artificial Sequence: Synthetic oligonucleotide
ccaaggggcuggccgaccucg

SEQ ID NO: 1116 - RNA, 21 nt, Artificial Sequence
  Description of Artificial Sequence: Synthetic oligonucleotide
aggucggccagccccuuggcc

SEQ ID NO: 1117 - RNA, 21 nt, Artificial Sequence
  Description of Artificial Sequence: Synthetic oligonucleotide
caaggggcuggccgaccucgc

SEQ ID NO: 1118 - RNA, 21 nt, Artificial Sequence
  Description of Artificial Sequence: Synthetic oligonucleotide
gaggucggccagccccuuggc

SEQ ID NO: 1119 - RNA, 21 nt, Artificial Sequence
  Description of Artificial Sequence: Synthetic oligonucleotide
aaggggcuggccgaccucgcu

SEQ ID NO: 1120 - RNA, 21 nt, Artificial Sequence
  Description of Artificial Sequence: Synthetic oligonucleotide
cgaggucggccagccccuugg

SEQ ID NO: 1121 - RNA, 21 nt, Artificial Sequence
  Description of Artificial Sequence: Synthetic oligonucleotide
aggggcuggccgaccucgcua

SEQ ID NO: 1122 - RNA, 21 nt, Artificial Sequence
  Description of Artificial Sequence: Synthetic oligonucleotide
gcgaggucggccagccccuug

SEQ ID NO: 1123 - RNA, 21 nt, Artificial Sequence
  Description of Artificial Sequence: Synthetic oligonucleotide
ggggcuggccgaccucgcuau

SEQ ID NO: 1124 - RNA, 21 nt, Artificial Sequence
  Description of Artificial Sequence: Synthetic oligonucleotide
agcgaggucggccagccccuu

SEQ ID NO: 1125 - RNA, 21 nt, Artificial Sequence
  Description of Artificial Sequence: Synthetic oligonucleotide
gggcuggccgaccucgcuauc

SEQ ID NO: 1126 - RNA, 21 nt, Artificial Sequence
  Description of Artificial Sequence: Synthetic oligonucleotide
uagcgaggucggccagccccu

SEQ ID NO: 1127 - RNA, 21 nt, Artificial Sequence
  Description of Artificial Sequence: Synthetic oligonucleotide
ggcuggccgaccucgcuauca

SEQ ID NO: 1128 - RNA, 21 nt, Artificial Sequence
  Description of Artificial Sequence: Synthetic oligonucleotide
auagcgaggucggccagcccc

SEQ ID NO: 1129 - RNA, 21 nt, Artificial Sequence
  Description of Artificial Sequence: Synthetic oligonucleotide
gcuggccgaccucgcuaucaa

SEQ ID NO: 1130 - RNA, 21 nt, Artificial Sequence
  Description of Artificial Sequence: Synthetic oligonucleotide
gauagcgaggucggccagccc

SEQ ID NO: 1131 - RNA, 21 nt, Artificial Sequence
  Description of Artificial Sequence: Synthetic oligonucleotide
cuggccgaccucgcuaucaaa

SEQ ID NO: 1132 - RNA, 21 nt, Artificial Sequence
  Description of Artificial Sequence: Synthetic oligonucleotide
ugauagcgaggucggccagcc

SEQ ID NO: 1133 - RNA, 21 nt, Artificial Sequence
  Description of Artificial Sequence: Synthetic oligonucleotide
uggccgaccucgcuaucaaag

SEQ ID NO: 1134 - RNA, 21 nt, Artificial Sequence
  Description of Artificial Sequence: Synthetic oligonucleotide
uugauagcgaggucggccagc

SEQ ID NO: 1135 - RNA, 21 nt, Artificial Sequence
  Description of Artificial Sequence: Synthetic oligonucleotide
ggccgaccucgcuaucaaaga

SEQ ID NO: 1136 - RNA, 21 nt, Artificial Sequence
  Description of Artificial Sequence: Synthetic oligonucleotide
uuugauagcgaggucggccag

SEQ ID NO: 1137 - RNA, 21 nt, Artificial Sequence
  Description of Artificial Sequence: Synthetic oligonucleotide
gccgaccucgcuaucaaagac

SEQ ID NO: 1138 - RNA, 21 nt, Artificial Sequence
  Description of Artificial Sequence: Synthetic oligonucleotide
cuuugauagcgaggucggcca

SEQ ID NO: 1139 - RNA, 21 nt, Artificial Sequence
  Description of Artificial Sequence: Synthetic oligonucleotide
ccgaccucgcuaucaaagacu

SEQ ID NO: 1140 - RNA, 21 nt, Artificial Sequence
  Description of Artificial Sequence: Synthetic oligonucleotide
ucuuugauagcgaggucggcc

SEQ ID NO: 1141 - RNA, 21 nt, Artificial Sequence
  Description of Artificial Sequence: Synthetic oligonucleotide
cgaccucgcuaucaaagacuc

SEQ ID NO: 1142 - RNA, 21 nt, Artificial Sequence
  Description of Artificial Sequence: Synthetic oligonucleotide
gucuuugauagcgaggucggc

SEQ ID NO: 1143 - RNA, 21 nt, Artificial Sequence
  Description of Artificial Sequence: Synthetic oligonucleotide
gaccucgcuaucaaagacucu

SEQ ID NO: 1144 - RNA, 21 nt, Artificial Sequence
  Description of Artificial Sequence: Synthetic oligonucleotide
agucuuugauagcgaggucgg

SEQ ID NO: 1145 - RNA, 21 nt, Artificial Sequence
  Description of Artificial Sequence: Synthetic oligonucleotide
accucgcuaucaaagacucuc

SEQ ID NO: 1146 - RNA, 21 nt, Artificial Sequence
  Description of Artificial Sequence: Synthetic oligonucleotide
gagucuuugauagcgaggucg

SEQ ID NO: 1147 - RNA, 21 nt, Artificial Sequence
  Description of Artificial Sequence: Synthetic oligonucleotide
ccucgcuaucaaagacucucu

SEQ ID NO: 1148 - RNA, 21 nt, Artificial Sequence
  Description of Artificial Sequence: Synthetic oligonucleotide
agagucuuugauagcgagguc

SEQ ID NO: 1149 - RNA, 21 nt, Artificial Sequence
  Description of Artificial Sequence: Synthetic oligonucleotide
cucgcuaucaaagacucucua

SEQ ID NO: 1150 - RNA, 21 nt, Artificial Sequence
  Description of Artificial Sequence: Synthetic oligonucleotide
gagagucuuugauagcgaggu

SEQ ID NO: 1151 - RNA, 21 nt, Artificial Sequence
  Description of Artificial Sequence: Synthetic oligonucleotide
ucgcuaucaaagacucucuaa

SEQ ID NO: 1152 - RNA, 21 nt, Artificial Sequence
  Description of Artificial Sequence: Synthetic oligonucleotide
agagagucuuugauagcgagg

SEQ ID NO: 1153 - RNA, 21 nt, Artificial Sequence
  Description of Artificial Sequence: Synthetic oligonucleotide
cgcuaucaaagacucucuaaa

SEQ ID NO: 1154 - RNA, 21 nt, Artificial Sequence
  Description of Artificial Sequence: Synthetic oligonucleotide
uagagagucuuugauagcgag

SEQ ID NO: 1155 - RNA, 21 nt, Artificial Sequence
  Description of Artificial Sequence: Synthetic oligonucleotide
gcuaucaaagacucucuaaau

SEQ ID NO: 1156 - RNA, 21 nt, Artificial Sequence
  Description of Artificial Sequence: Synthetic oligonucleotide
uuagagagucuuugauagcga

SEQ ID NO: 1157 - RNA, 21 nt, Artificial Sequence
  Description of Artificial Sequence: Synthetic oligonucleotide
cuaucaaagacucucuaaaug

SEQ ID NO: 1158 - RNA, 21 nt, Artificial Sequence
  Description of Artificial Sequence: Synthetic oligonucleotide
uuuagagagucuuugauagcg

SEQ ID NO: 1159 - RNA, 21 nt, Artificial Sequence
  Description of Artificial Sequence: Synthetic oligonucleotide
uaucaaagacucucuaaaugu

SEQ ID NO: 1160 - RNA, 21 nt, Artificial Sequence
  Description of Artificial Sequence: Synthetic oligonucleotide
auuuagagagucuuugauagc

SEQ ID NO: 1161 - RNA, 21 nt, Artificial Sequence
  Description of Artificial Sequence: Synthetic oligonucleotide
aucaaagacucucuaaauguu

SEQ ID NO: 1162 - RNA, 21 nt, Artificial Sequence
  Description of Artificial Sequence: Synthetic oligonucleotide
cauuuagagagucuuugauag

SEQ ID NO: 1163 - RNA, 21 nt, Artificial Sequence
  Description of Artificial Sequence: Synthetic oligonucleotide
ucaaagacucucuaaauguuc

SEQ ID NO: 1164 - RNA, 21 nt, Artificial Sequence
  Description of Artificial Sequence: Synthetic oligonucleotide
acauuuagagagucuuugaua

SEQ ID NO: 1165 - RNA, 21 nt, Artificial Sequence
  Description of Artificial Sequence: Synthetic oligonucleotide
caaagacucucuaaauguucu

SEQ ID NO: 1166 - RNA, 21 nt, Artificial Sequence
  Description of Artificial Sequence: Synthetic oligonucleotide
aacauuuagagagucuuugau

SEQ ID NO: 1167 - RNA, 21 nt, Artificial Sequence
  Description of Artificial Sequence: Synthetic oligonucleotide
aaagacucucuaaauguucug

SEQ ID NO: 1168 - RNA, 21 nt, Artificial Sequence
  Description of Artificial Sequence: Synthetic oligonucleotide
gaacauuuagagagucuuuga

SEQ ID NO: 1169 - RNA, 21 nt, Artificial Sequence
  Description of Artificial Sequence: Synthetic oligonucleotide
aagacucucuaaauguucuga

SEQ ID NO: 1170 - RNA, 21 nt, Artificial Sequence
  Description of Artificial Sequence: Synthetic oligonucleotide
agaacauuuagagagucuuug

SEQ ID NO: 1171 - RNA, 21 nt, Artificial Sequence
  Description of Artificial Sequence: Synthetic oligonucleotide
agacucucuaaauguucugac

SEQ ID NO: 1172 - RNA, 21 nt, Artificial Sequence
  Description of Artificial Sequence: Synthetic oligonucleotide
cagaacauuuagagagucuuu

SEQ ID NO: 1173 - RNA, 21 nt, Artificial Sequence
  Description of Artificial Sequence: Synthetic oligonucleotide
gacucucuaaauguucugacu

SEQ ID NO: 1174 - RNA, 21 nt, Artificial Sequence
  Description of Artificial Sequence: Synthetic oligonucleotide
ucagaacauuuagagagucuu

SEQ ID NO: 1175 - RNA, 21 nt, Artificial Sequence
  Description of Artificial Sequence: Synthetic oligonucleotide
acucucuaaauguucugacuu

SEQ ID NO: 1176 - RNA, 21 nt, Artificial Sequence
  Description of Artificial Sequence: Synthetic oligonucleotide
gucagaacauuuagagagucu

SEQ ID NO: 1177 - RNA, 21 nt, Artificial Sequence
  Description of Artificial Sequence: Synthetic oligonucleotide
cucucuaaauguucugacuug

SEQ ID NO: 1178 - RNA, 21 nt, Artificial Sequence
  Description of Artificial Sequence: Synthetic oligonucleotide
agucagaacauuuagagaguc

SEQ ID NO: 1179 - RNA, 21 nt, Artificial Sequence
  Description of Artificial Sequence: Synthetic oligonucleotide
ucucuaaauguucugacuugc

SEQ ID NO: 1180 - RNA, 21 nt, Artificial Sequence
  Description of Artificial Sequence: Synthetic oligonucleotide
aagucagaacauuuagagagu

SEQ ID NO: 1181 - RNA, 21 nt, Artificial Sequence
  Description of Artificial Sequence: Synthetic oligonucleotide
cucuaaauguucugacuugcu

SEQ ID NO: 1182 - RNA, 21 nt, Artificial Sequence
  Description of Artificial Sequence: Synthetic oligonucleotide
caagucagaacauuuagagag

SEQ ID NO: 1183 - RNA, 21 nt, Artificial Sequence
  Description of Artificial Sequence: Synthetic oligonucleotide
ucuaaauguucugacuugcug

SEQ ID NO: 1184 - RNA, 21 nt, Artificial Sequence
  Description of Artificial Sequence: Synthetic oligonucleotide
gcaagucagaacauuuagaga

SEQ ID NO: 1185 - RNA, 21 nt, Artificial Sequence
  Description of Artificial Sequence: Synthetic oligonucleotide
cuaaauguucugacuugcugg

SEQ ID NO: 1186 - RNA, 21 nt, Artificial Sequence
  Description of Artificial Sequence: Synthetic oligonucleotide
agcaagucagaacauuuagag

SEQ ID NO: 1187 - RNA, 21 nt, Artificial Sequence
  Description of Artificial Sequence: Synthetic oligonucleotide
uaaauguucugacuugcugga

SEQ ID NO: 1188 - RNA, 21 nt, Artificial Sequence
  Description of Artificial Sequence: Synthetic oligonucleotide
cagcaagucagaacauuuaga

SEQ ID NO: 1189 - RNA, 21 nt, Artificial Sequence
  Description of Artificial Sequence: Synthetic oligonucleotide
aaauguucugacuugcuggaa

SEQ ID NO: 1190 - RNA, 21 nt, Artificial Sequence
  Description of Artificial Sequence: Synthetic oligonucleotide
ccagcaagucagaacauuuag

SEQ ID NO: 1191 - RNA, 21 nt, Artificial Sequence
  Description of Artificial Sequence: Synthetic oligonucleotide
aauguucugacuugcuggaag

SEQ ID NO: 1192 - RNA, 21 nt, Artificial Sequence
  Description of Artificial Sequence: Synthetic oligonucleotide
uccagcaagucagaacauuua

SEQ ID NO: 1193 - RNA, 21 nt, Artificial Sequence
  Description of Artificial Sequence: Synthetic oligonucleotide
auguucugacuugcuggaagg

SEQ ID NO: 1194 - RNA, 21 nt, Artificial Sequence
  Description of Artificial Sequence: Synthetic oligonucleotide
uuccagcaagucagaacauuu

SEQ ID NO: 1195 - RNA, 21 nt, Artificial Sequence
  Description of Artificial Sequence: Synthetic oligonucleotide
uguucugacuugcuggaagga

SEQ ID NO: 1196 - RNA, 21 nt, Artificial Sequence
  Description of Artificial Sequence: Synthetic oligonucleotide
cuuccagcaagucagaacauu

SEQ ID NO: 1197 - RNA, 21 nt, Artificial Sequence
  Description of Artificial Sequence: Synthetic oligonucleotide
guucugacuugcuggaaggau

SEQ ID NO: 1198 - RNA, 21 nt, Artificial Sequence
  Description of Artificial Sequence: Synthetic oligonucleotide
ccuuccagcaagucagaacau

SEQ ID NO: 1199 - RNA, 21 nt, Artificial Sequence
  Description of Artificial Sequence: Synthetic oligonucleotide
uucugacuugcuggaaggauc

SEQ ID NO: 1200 - RNA, 21 nt, Artificial Sequence
  Description of Artificial Sequence: Synthetic oligonucleotide
uccuuccagcaagucagaaca

SEQ ID NO: 1201 - RNA, 21 nt, Artificial Sequence
  Description of Artificial Sequence: Synthetic oligonucleotide
ucugacuugcuggaaggaucu

SEQ ID NO: 1202 - RNA, 21 nt, Artificial Sequence
  Description of Artificial Sequence: Synthetic oligonucleotide
auccuuccagcaagucagaac

SEQ ID NO: 1203 - RNA, 21 nt, Artificial Sequence
  Description of Artificial Sequence: Synthetic oligonucleotide
cugacuugcuggaaggaucua

SEQ ID NO: 1204 - RNA, 21 nt, Artificial Sequence
  Description of Artificial Sequence: Synthetic oligonucleotide
gauccuuccagcaagucagaa

SEQ ID NO: 1205 - RNA, 21 nt, Artificial Sequence
  Description of Artificial Sequence: Synthetic oligonucleotide
ugacuugcuggaaggaucuag

SEQ ID NO: 1206 - RNA, 21 nt, Artificial Sequence
  Description of Artificial Sequence: Synthetic oligonucleotide
agauccuuccagcaagucaga

SEQ ID NO: 1207 - RNA, 21 nt, Artificial Sequence
  Description of Artificial Sequence: Synthetic oligonucleotide
gacuugcuggaaggaucuaga

SEQ ID NO: 1208 - RNA, 21 nt, Artificial Sequence
  Description of Artificial Sequence: Synthetic oligonucleotide
uagauccuuccagcaagucag

SEQ ID NO: 1209 - RNA, 21 nt, Artificial Sequence
  Description of Artificial Sequence: Synthetic oligonucleotide
acuugcuggaaggaucuagau

SEQ ID NO: 1210 - RNA, 21 nt, Artificial Sequence
  Description of Artificial Sequence: Synthetic oligonucleotide
cuagauccuuccagcaaguca

SEQ ID NO: 1211 - RNA, 21 nt, Artificial Sequence
  Description of Artificial Sequence: Synthetic oligonucleotide
cuugcuggaaggaucuagaug

SEQ ID NO: 1212 - RNA, 21 nt, Artificial Sequence
  Description of Artificial Sequence: Synthetic oligonucleotide
ucuagauccuuccagcaaguc

SEQ ID NO: 1213 - RNA, 21 nt, Artificial Sequence
  Description of Artificial Sequence: Synthetic oligonucleotide
uugcuggaaggaucuagauga

SEQ ID NO: 1214 - RNA, 21 nt, Artificial Sequence
  Description of Artificial Sequence: Synthetic oligonucleotide
aucuagauccuuccagcaagu

SEQ ID NO: 1215 - RNA, 21 nt, Artificial Sequence
  Description of Artificial Sequence: Synthetic oligonucleotide
ugcuggaaggaucuagaugac

SEQ ID NO: 1216 - RNA, 21 nt, Artificial Sequence
  Description of Artificial Sequence: Synthetic oligonucleotide
caucuagauccuuccagcaag

SEQ ID NO: 1217 - RNA, 21 nt, Artificial Sequence
  Description of Artificial Sequence: Synthetic oligonucleotide
gcuggaaggaucuagaugacu

SEQ ID NO: 1218 - RNA, 21 nt, Artificial Sequence
  Description of Artificial Sequence: Synthetic oligonucleotide
ucaucuagauccuuccagcaa

SEQ ID NO: 1219 - RNA, 21 nt, Artificial Sequence
  Description of Artificial Sequence: Synthetic oligonucleotide
cuggaaggaucuagaugacuu

SEQ ID NO: 1220 - RNA, 21 nt, Artificial Sequence
  Description of Artificial Sequence: Synthetic oligonucleotide
gucaucuagauccuuccagca

SEQ ID NO: 1221 - RNA, 21 nt, Artificial Sequence
  Description of Artificial Sequence: Synthetic oligonucleotide
uggaaggaucuagaugacuuc

SEQ ID NO: 1222 - RNA, 21 nt, Artificial Sequence
  Description of Artificial Sequence: Synthetic oligonucleotide
agucaucuagauccuuccagc

SEQ ID NO: 1223 - RNA, 21 nt, Artificial Sequence
  Description of Artificial Sequence: Synthetic oligonucleotide
ggaaggaucuagaugacuuca

SEQ ID NO: 1224 - RNA, 21 nt, Artificial Sequence
  Description of Artificial Sequence: Synthetic oligonucleotide
aagucaucuagauccuuccag

SEQ ID NO: 1225 - RNA, 21 nt, Artificial Sequence
  Description of Artificial Sequence: Synthetic oligonucleotide
gaaggaucuagaugacuucaa

SEQ ID NO: 1226 - RNA, 21 nt, Artificial Sequence
  Description of Artificial Sequence: Synthetic oligonucleotide
gaagucaucuagauccuucca

SEQ ID NO: 1227 - RNA, 21 nt, Artificial Sequence
  Description of Artificial Sequence: Synthetic oligonucleotide
aaggaucuagaugacuucaac

SEQ ID NO: 1228 - RNA, 21 nt, Artificial Sequence
  Description of Artificial Sequence: Synthetic oligonucleotide
ugaagucaucuagauccuucc

SEQ ID NO: 1229 - RNA, 21 nt, Artificial Sequence
  Description of Artificial Sequence: Synthetic oligonucleotide
aggaucuagaugacuucaacc

SEQ ID NO: 1230 - RNA, 21 nt, Artificial Sequence
  Description of Artificial Sequence: Synthetic oligonucleotide
uugaagucaucuagauccuuc

SEQ ID NO: 1231 - RNA, 21 nt, Artificial Sequence
  Description of Artificial Sequence: Synthetic oligonucleotide
ggaucuagaugacuucaaccg

SEQ ID NO: 1232 - RNA, 21 nt, Artificial Sequence
  Description of Artificial Sequence: Synthetic oligonucleotide
guugaagucaucuagauccuu

SEQ ID NO: 1233 - RNA, 21 nt, Artificial Sequence
  Description of Artificial Sequence: Synthetic oligonucleotide
gaucuagaugacuucaaccgg

SEQ ID NO: 1234 - RNA, 21 nt, Artificial Sequence
  Description of Artificial Sequence: Synthetic oligonucleotide
gguugaagucaucuagauccu

SEQ ID NO: 1235 - RNA, 21 nt, Artificial Sequence
  Description of Artificial Sequence: Synthetic oligonucleotide
aucuagaugacuucaaccgga

SEQ ID NO: 1236 - RNA, 21 nt, Artificial Sequence
  Description of Artificial Sequence: Synthetic oligonucleotide
cgguugaagucaucuagaucc

SEQ ID NO: 1237 - RNA, 21 nt, Artificial Sequence
  Description of Artificial Sequence: Synthetic oligonucleotide
ucuagaugacuucaaccggau

SEQ ID NO: 1238 - RNA, 21 nt, Artificial Sequence
  Description of Artificial Sequence: Synthetic oligonucleotide
ccgguugaagucaucuagauc

SEQ ID NO: 1239 - RNA, 21 nt, Artificial Sequence
  Description of Artificial Sequence: Synthetic oligonucleotide
cuagaugacuucaaccggauu

SEQ ID NO: 1240 - RNA, 21 nt, Artificial Sequence
  Description of Artificial Sequence: Synthetic oligonucleotide
uccgguugaagucaucuagau

SEQ ID NO: 1241 - RNA, 21 nt, Artificial Sequence
  Description of Artificial Sequence: Synthetic oligonucleotide
uagaugacuucaaccggauuu

SEQ ID NO: 1242 - RNA, 21 nt, Artificial Sequence
  Description of Artificial Sequence: Synthetic oligonucleotide
auccgguugaagucaucuaga

SEQ ID NO: 1243 - RNA, 21 nt, Artificial Sequence
  Description of Artificial Sequence: Synthetic oligonucleotide
agaugacuucaaccggauuuu

SEQ ID NO: 1244 - RNA, 21 nt, Artificial Sequence
  Description of Artificial Sequence: Synthetic oligonucleotide
aauccgguugaagucaucuag

SEQ ID NO: 1245 - RNA, 21 nt, Artificial Sequence
  Description of Artificial Sequence: Synthetic oligonucleotide
gaugacuucaaccggauuuuc

SEQ ID NO: 1246 - RNA, 21 nt, Artificial Sequence
  Description of Artificial Sequence: Synthetic oligonucleotide
aaauccgguugaagucaucua

SEQ ID NO: 1247 - RNA, 21 nt, Artificial Sequence
  Description of Artificial Sequence: Synthetic oligonucleotide
augacuucaaccggauuuucu

SEQ ID NO: 1248 - RNA, 21 nt, Artificial Sequence
  Description of Artificial Sequence: Synthetic oligonucleotide
aaaauccgguugaagucaucu

SEQ ID NO: 1249 - RNA, 21 nt, Artificial Sequence
  Description of Artificial Sequence: Synthetic oligonucleotide
ugacuucaaccggauuuucug

SEQ ID NO: 1250 - RNA, 21 nt, Artificial Sequence
  Description of Artificial Sequence: Synthetic oligonucleotide
gaaaauccgguugaagucauc

SEQ ID NO: 1251 - RNA, 21 nt, Artificial Sequence
  Description of Artificial Sequence: Synthetic oligonucleotide
gacuucaaccggauuuucugg

SEQ ID NO: 1252 - RNA, 21 nt, Artificial Sequence
  Description of Artificial Sequence: Synthetic oligonucleotide
agaaaauccgguugaagucau

SEQ ID NO: 1253 - RNA, 21 nt, Artificial Sequence
  Description of Artificial Sequence: Synthetic oligonucleotide
acuucaaccggauuuucuggu

SEQ ID NO: 1254 - RNA, 21 nt, Artificial Sequence
  Description of Artificial Sequence: Synthetic oligonucleotide
cagaaaauccgguugaaguca

SEQ ID NO: 1255 - RNA, 21 nt, Artificial Sequence
  Description of Artificial Sequence: Synthetic oligonucleotide
cuucaaccggauuuucuggug

SEQ ID NO: 1256 - RNA, 21 nt, Artificial Sequence
  Description of Artificial Sequence: Synthetic oligonucleotide
ccagaaaauccgguugaaguc

SEQ ID NO: 1257 - RNA, 21 nt, Artificial Sequence
  Description of Artificial Sequence: Synthetic oligonucleotide
uucaaccggauuuucuggugu

SEQ ID NO: 1258 - RNA, 21 nt, Artificial Sequence
  Description of Artificial Sequence: Synthetic oligonucleotide
accagaaaauccgguugaagu

SEQ ID NO: 1259 - RNA, 21 nt, Artificial Sequence
  Description of Artificial Sequence: Synthetic oligonucleotide
ucaaccggauuuucuggugug

SEQ ID NO: 1260 - RNA, 21 nt, Artificial Sequence
  Description of Artificial Sequence: Synthetic oligonucleotide
caccagaaaauccgguugaag

SEQ ID NO: 1261 - RNA, 21 nt, Artificial Sequence
  Description of Artificial Sequence: Synthetic oligonucleotide
caaccggauuuucuggugugg

SEQ ID NO: 1262 - RNA, 21 nt, Artificial Sequence
  Description of Artificial Sequence: Synthetic oligonucleotide
acaccagaaaauccgguugaa

SEQ ID NO: 1263 - RNA, 21 nt, Artificial Sequence
  Description of Artificial Sequence: Synthetic oligonucleotide
aaccggauuuucugguguggu

SEQ ID NO: 1264 - RNA, 21 nt, Artificial Sequence
  Description of Artificial Sequence: Synthetic oligonucleotide
cacaccagaaaauccgguuga

SEQ ID NO: 1265 - RNA, 21 nt, Artificial Sequence
  Description of Artificial Sequence: Synthetic oligonucleotide
accggauuuucuggugugguc

SEQ ID NO: 1266 - RNA, 21 nt, Artificial Sequence
  Description of Artificial Sequence: Synthetic oligonucleotide
ccacaccagaaaauccgguug

SEQ ID NO: 1267 - RNA, 21 nt, Artificial Sequence
  Description of Artificial Sequence: Synthetic oligonucleotide
ccggauuuucuggugugguca

SEQ ID NO: 1268 - RNA, 21 nt, Artificial Sequence
  Description of Artificial Sequence: Synthetic oligonucleotide
accacaccagaaaauccgguu

SEQ ID NO: 1269 - RNA, 21 nt, Artificial Sequence
  Description of Artificial Sequence: Synthetic oligonucleotide
cggauuuucugguguggucag

SEQ ID NO: 1270 - RNA, 21 nt, Artificial Sequence
  Description of Artificial Sequence: Synthetic oligonucleotide
gaccacaccagaaaauccggu

SEQ ID NO: 1271 - RNA, 21 nt, Artificial Sequence
  Description of Artificial Sequence: Synthetic oligonucleotide
ggauuuucugguguggucaga

SEQ ID NO: 1272 - RNA, 21 nt, Artificial Sequence
  Description of Artificial Sequence: Synthetic oligonucleotide
ugaccacaccagaaaauccgg

SEQ ID NO: 1273 - RNA, 21 nt, Artificial Sequence
  Description of Artificial Sequence: Synthetic oligonucleotide
gauuuucugguguggucagag

SEQ ID NO: 1274 - RNA, 21 nt, Artificial Sequence
  Description of Artificial Sequence: Synthetic oligonucleotide
cugaccacaccagaaaauccg

SEQ ID NO: 1275 - RNA, 21 nt, Artificial Sequence
  Description of Artificial Sequence: Synthetic oligonucleotide
auuuucugguguggucagagc

SEQ ID NO: 1276 - RNA, 21 nt, Artificial Sequence
  Description of Artificial Sequence: Synthetic oligonucleotide
ucugaccacaccagaaaaucc

SEQ ID NO: 1277 - RNA, 21 nt, Artificial Sequence
  Description of Artificial Sequence: Synthetic oligonucleotide
uuuucugguguggucagagca

SEQ ID NO: 1278 - RNA, 21 nt, Artificial Sequence
  Description of Artificial Sequence: Synthetic oligonucleotide
cucugaccacaccagaaaauc

SEQ ID NO: 1279 - RNA, 21 nt, Artificial Sequence
  Description of Artificial Sequence: Synthetic oligonucleotide
uuucugguguggucagagcaa

SEQ ID NO: 1280 - RNA, 21 nt, Artificial Sequence
  Description of Artificial Sequence: Synthetic oligonucleotide
gcucugaccacaccagaaaau

SEQ ID NO: 1281 - RNA, 21 nt, Artificial Sequence
  Description of Artificial Sequence: Synthetic oligonucleotide
uucugguguggucagagcaag

SEQ ID NO: 1282 - RNA, 21 nt, Artificial Sequence
  Description of Artificial Sequence: Synthetic oligonucleotide
ugcucugaccacaccagaaaa

SEQ ID NO: 1283 - RNA, 21 nt, Artificial Sequence
  Description of Artificial Sequence: Synthetic oligonucleotide
ucugguguggucagagcaagc

SEQ ID NO: 1284 - RNA, 21 nt, Artificial Sequence
  Description of Artificial Sequence: Synthetic oligonucleotide
uugcucugaccacaccagaaa

SEQ ID NO: 1285 - RNA, 21 nt, Artificial Sequence
  Description of Artificial Sequence: Synthetic oligonucleotide
cugguguggucagagcaagcu

SEQ ID NO: 1286 - RNA, 21 nt, Artificial Sequence
  Description of Artificial Sequence: Synthetic oligonucleotide
cuugcucugaccacaccagaa

SEQ ID NO: 1287 - RNA, 21 nt, Artificial Sequence
  Description of Artificial Sequence: Synthetic oligonucleotide
ugguguggucagagcaagcug

SEQ ID NO: 1288 - RNA, 21 nt, Artificial Sequence
  Description of Artificial Sequence: Synthetic oligonucleotide
gcuugcucugaccacaccaga

SEQ ID NO: 1289 - RNA, 21 nt, Artificial Sequence
  Description of Artificial Sequence: Synthetic oligonucleotide
gguguggucagagcaagcugg

SEQ ID NO: 1290 - RNA, 21 nt, Artificial Sequence
  Description of Artificial Sequence: Synthetic oligonucleotide
agcuugcucugaccacaccag

SEQ ID NO: 1291 - RNA, 21 nt, Artificial Sequence
  Description of Artificial Sequence: Synthetic oligonucleotide
guguggucagagcaagcuggc

SEQ ID NO: 1292 - RNA, 21 nt, Artificial Sequence
  Description of Artificial Sequence: Synthetic oligonucleotide
cagcuugcucugaccacacca

SEQ ID NO: 1293 - RNA, 21 nt, Artificial Sequence
  Description of Artificial Sequence: Synthetic oligonucleotide
uguggucagagcaagcuggcu

SEQ ID NO: 1294 - RNA, 21 nt, Artificial Sequence
  Description of Artificial Sequence: Synthetic oligonucleotide
ccagcuugcucugaccacacc

SEQ ID NO: 1295 - RNA, 21 nt, Artificial Sequence
  Description of Artificial Sequence: Synthetic oligonucleotide
guggucagagcaagcuggcug

SEQ ID NO: 1296 - RNA, 21 nt, Artificial Sequence
  Description of Artificial Sequence: Synthetic oligonucleotide
gccagcuugcucugaccacac

SEQ ID NO: 1297 - RNA, 21 nt, Artificial Sequence
  Description of Artificial Sequence: Synthetic oligonucleotide
uggucagagcaagcuggcuga

SEQ ID NO: 1298 - RNA, 21 nt, Artificial Sequence
  Description of Artificial Sequence: Synthetic oligonucleotide
agccagcuugcucugaccaca

SEQ ID NO: 1299 - RNA, 21 nt, Artificial Sequence
  Description of Artificial Sequence: Synthetic oligonucleotide
ggucagagcaagcuggcugag

SEQ ID NO: 1300 - RNA, 21 nt, Artificial Sequence
  Description of Artificial Sequence: Synthetic oligonucleotide
cagccagcuugcucugaccac

SEQ ID NO: 1301 - RNA, 21 nt, Artificial Sequence
  Description of Artificial Sequence: Synthetic oligonucleotide
gucagagcaagcuggcugagc

SEQ ID NO: 1302 - RNA, 21 nt, Artificial Sequence
  Description of Artificial Sequence: Synthetic oligonucleotide
ucagccagcuugcucugacca

SEQ ID NO: 1303 - RNA, 21 nt, Artificial Sequence
  Description of Artificial Sequence: Synthetic oligonucleotide
ucagagcaagcuggcugagcg

SEQ ID NO: 1304 - RNA, 21 nt, Artificial Sequence
  Description of Artificial Sequence: Synthetic oligonucleotide
cucagccagcuugcucugacc

SEQ ID NO: 1305 - RNA, 21 nt, Artificial Sequence
  Description of Artificial Sequence: Synthetic oligonucleotide
cagagcaagcuggcugagcgc

SEQ ID NO: 1306 - RNA, 21 nt, Artificial Sequence
  Description of Artificial Sequence: Synthetic oligonucleotide
gcucagccagcuugcucugac

SEQ ID NO: 1307 - RNA, 21 nt, Artificial Sequence
  Description of Artificial Sequence: Synthetic oligonucleotide
agagcaagcuggcugagcgcg

SEQ ID NO: 1308 - RNA, 21 nt, Artificial Sequence
  Description of Artificial Sequence: Synthetic oligonucleotide
cgcucagccagcuugcucuga

SEQ ID NO: 1309 - RNA, 21 nt, Artificial Sequence
  Description of Artificial Sequence: Synthetic oligonucleotide
gagcaagcuggcugagcgcgu

SEQ ID NO: 1310 - RNA, 21 nt, Artificial Sequence
  Description of Artificial Sequence: Synthetic oligonucleotide
gcgcucagccagcuugcucug

SEQ ID NO: 1311 - RNA, 21 nt, Artificial Sequence
  Description of Artificial Sequence: Synthetic oligonucleotide
agcaagcuggcugagcgcgug

SEQ ID NO: 1312 - RNA, 21 nt, Artificial Sequence
  Description of Artificial Sequence: Synthetic oligonucleotide
cgcgcucagccagcuugcucu

SEQ ID NO: 1313 - RNA, 21 nt, Artificial Sequence
  Description of Artificial Sequence: Synthetic oligonucleotide
gcaagcuggcugagcgcgugc

SEQ ID NO: 1314 - RNA, 21 nt, Artificial Sequence
  Description of Artificial Sequence: Synthetic oligonucleotide
acgcgcucagccagcuugcuc

SEQ ID NO: 1315 - RNA, 21 nt, Artificial Sequence
  Description of Artificial Sequence: Synthetic oligonucleotide
caagcuggcugagcgcgugcg

SEQ ID NO: 1316 - RNA, 21 nt, Artificial Sequence
  Description of Artificial Sequence: Synthetic oligonucleotide
cacgcgcucagccagcuugcu

SEQ ID NO: 1317 - RNA, 21 nt, Artificial Sequence
  Description of Artificial Sequence: Synthetic oligonucleotide
aagcuggcugagcgcgugcgg

SEQ ID NO: 1318 - RNA, 21 nt, Artificial Sequence
  Description of Artificial Sequence: Synthetic oligonucleotide
gcacgcgcucagccagcuugc

SEQ ID NO: 1319 - RNA, 21 nt, Artificial Sequence
  Description of Artificial Sequence: Synthetic oligonucleotide
agcuggcugagcgcgugcggg

SEQ ID NO: 1320 - RNA, 21 nt, Artificial Sequence
  Description of Artificial Sequence: Synthetic oligonucleotide
cgcacgcgcucagccagcuug

SEQ ID NO: 1321 - RNA, 21 nt, Artificial Sequence
  Description of Artificial Sequence: Synthetic oligonucleotide
gcuggcugagcgcgugcggga

SEQ ID NO: 1322 - RNA, 21 nt, Artificial Sequence
  Description of Artificial Sequence: Synthetic oligonucleotide
ccgcacgcgcucagccagcuu

SEQ ID NO: 1323 - RNA, 21 nt, Artificial Sequence
  Description of Artificial Sequence: Synthetic oligonucleotide
cuggcugagcgcgugcgggac

SEQ ID NO: 1324 - RNA, 21 nt, Artificial Sequence
  Description of Artificial Sequence: Synthetic oligonucleotide
cccgcacgcgcucagccagcu

SEQ ID NO: 1325 - RNA, 21 nt, Artificial Sequence
  Description of Artificial Sequence: Synthetic oligonucleotide
uggcugagcgcgugcgggacu

SEQ ID NO: 1326 - RNA, 21 nt, Artificial Sequence
  Description of Artificial Sequence: Synthetic oligonucleotide
ucccgcacgcgcucagccagc

SEQ ID NO: 1327 - RNA, 21 nt, Artificial Sequence
  Description of Artificial Sequence: Synthetic oligonucleotide
ggcugagcgcgugcgggacuc

SEQ ID NO: 1328 - RNA, 21 nt, Artificial Sequence
  Description of Artificial Sequence: Synthetic oligonucleotide
gucccgcacgcgcucagccag

SEQ ID NO: 1329 - RNA, 21 nt, Artificial Sequence
  Description of Artificial Sequence: Synthetic oligonucleotide
gcugagcgcgugcgggacucc

SEQ ID NO: 1330 - RNA, 21 nt, Artificial Sequence
  Description of Artificial Sequence: Synthetic oligonucleotide
agucccgcacgcgcucagcca

SEQ ID NO: 1331 - RNA, 21 nt, Artificial Sequence
  Description of Artificial Sequence: Synthetic oligonucleotide
cugagcgcgugcgggacuccu

SEQ ID NO: 1332 - RNA, 21 nt, Artificial Sequence
  Description of Artificial Sequence: Synthetic oligonucleotide
gagucccgcacgcgcucagcc

SEQ ID NO: 1333 - RNA, 21 nt, Artificial Sequence
  Description of Artificial Sequence: Synthetic oligonucleotide
ugagcgcgugcgggacuccug

SEQ ID NO: 1334 - RNA, 21 nt, Artificial Sequence
  Description of Artificial Sequence: Synthetic oligonucleotide
ggagucccgcacgcgcucagc

SEQ ID NO: 1335 - RNA, 21 nt, Artificial Sequence
  Description of Artificial Sequence: Synthetic oligonucleotide
gagcgcgugcgggacuccugg

SEQ ID NO: 1336 - RNA, 21 nt, Artificial Sequence
  Description of Artificial Sequence: Synthetic oligonucleotide
aggagucccgcacgcgcucag

SEQ ID NO: 1337 - RNA, 21 nt, Artificial Sequence
  Description of Artificial Sequence: Synthetic oligonucleotide
agcgcgugcgggacuccugga

SEQ ID NO: 1338 - RNA, 21 nt, Artificial Sequence
  Description of Artificial Sequence: Synthetic oligonucleotide
caggagucccgcacgcgcuca

SEQ ID NO: 1339 - RNA, 21 nt, Artificial Sequence
  Description of Artificial Sequence: Synthetic oligonucleotide
gcgcgugcgggacuccuggaa

SEQ ID NO: 1340 - RNA, 21 nt, Artificial Sequence
  Description of Artificial Sequence: Synthetic oligonucleotide
ccaggagucccgcacgcgcuc

SEQ ID NO: 1341 - RNA, 21 nt, Artificial Sequence
  Description of Artificial Sequence: Synthetic oligonucleotide
cgcgugcgggacuccuggaag

SEQ ID NO: 1342 - RNA, 21 nt, Artificial Sequence
  Description of Artificial Sequence: Synthetic oligonucleotide
uccaggagucccgcacgcgcu

SEQ ID NO: 1343 - RNA, 21 nt, Artificial Sequence
  Description of Artificial Sequence: Synthetic oligonucleotide
gcgugcgggacuccuggaagg

SEQ ID NO: 1344 - RNA, 21 nt, Artificial Sequence
  Description of Artificial Sequence: Synthetic oligonucleotide
uuccaggagucccgcacgcgc

SEQ ID NO: 1345 - RNA, 21 nt, Artificial Sequence
  Description of Artificial Sequence: Synthetic oligonucleotide
cgugcgggacuccuggaagga

SEQ ID NO: 1346 - RNA, 21 nt, Artificial Sequence
  Description of Artificial Sequence: Synthetic oligonucleotide
cuuccaggagucccgcacgcg

SEQ ID NO: 1347 - RNA, 21 nt, Artificial Sequence
  Description of Artificial Sequence: Synthetic oligonucleotide
gugcgggacuccuggaaggaa

SEQ ID NO: 1348 - RNA, 21 nt, Artificial Sequence
  Description of Artificial Sequence: Synthetic oligonucleotide
ccuuccaggagucccgcacgc

SEQ ID NO: 1349 - RNA, 21 nt, Artificial Sequence
  Description of Artificial Sequence: Synthetic oligonucleotide
ugcgggacuccuggaaggaag

SEQ ID NO: 1350 - RNA, 21 nt, Artificial Sequence
  Description of Artificial Sequence: Synthetic oligonucleotide
uccuuccaggagucccgcacg

SEQ ID NO: 1351 - RNA, 21 nt, Artificial Sequence
  Description of Artificial Sequence: Synthetic oligonucleotide
gcgggacuccuggaaggaaga

SEQ ID NO: 1352 - RNA, 21 nt, Artificial Sequence
  Description of Artificial Sequence: Synthetic oligonucleotide
uuccuuccaggagucccgcac

SEQ ID NO: 1353 - RNA, 21 nt, Artificial Sequence
  Description of Artificial Sequence: Synthetic oligonucleotide
cgggacuccuggaaggaagau

SEQ ID NO: 1354 - RNA, 21 nt, Artificial Sequence
  Description of Artificial Sequence: Synthetic oligonucleotide
cuuccuuccaggagucccgca

SEQ ID NO: 1355 - RNA, 21 nt, Artificial Sequence
  Description of Artificial Sequence: Synthetic oligonucleotide
gggacuccuggaaggaagaug

SEQ ID NO: 1356 - RNA, 21 nt, Artificial Sequence
  Description of Artificial Sequence: Synthetic oligonucleotide
ucuuccuuccaggagucccgc

SEQ ID NO: 1357 - RNA, 21 nt, Artificial Sequence
  Description of Artificial Sequence: Synthetic oligonucleotide
ggacuccuggaaggaagaugc

SEQ ID NO: 1358 - RNA, 21 nt, Artificial Sequence
  Description of Artificial Sequence: Synthetic oligonucleotide
aucuuccuuccaggagucccg

SEQ ID NO: 1359 - RNA, 21 nt, Artificial Sequence
  Description of Artificial Sequence: Synthetic oligonucleotide
gacuccuggaaggaagaugcc

SEQ ID NO: 1360 - RNA, 21 nt, Artificial Sequence
  Description of Artificial Sequence: Synthetic oligonucleotide
caucuuccuuccaggaguccc

SEQ ID NO: 1361 - RNA, 21 nt, Artificial Sequence
  Description of Artificial Sequence: Synthetic oligonucleotide
acuccuggaaggaagaugccu

SEQ ID NO: 1362 - RNA, 21 nt, Artificial Sequence
  Description of Artificial Sequence: Synthetic oligonucleotide
gcaucuuccuuccaggagucc

SEQ ID NO: 1363 - RNA, 21 nt, Artificial Sequence
  Description of Artificial Sequence: Synthetic oligonucleotide
cuccuggaaggaagaugccuu

SEQ ID NO: 1364 - RNA, 21 nt, Artificial Sequence
  Description of Artificial Sequence: Synthetic oligonucleotide
ggcaucuuccuuccaggaguc

SEQ ID NO: 1365 - RNA, 21 nt, Artificial Sequence
  Description of Artificial Sequence: Synthetic oligonucleotide
uccuggaaggaagaugccuua

SEQ ID NO: 1366 - RNA, 21 nt, Artificial Sequence
  Description of Artificial Sequence: Synthetic oligonucleotide
aggcaucuuccuuccaggagu

SEQ ID NO: 1367 - RNA, 21 nt, Artificial Sequence
  Description of Artificial Sequence: Synthetic oligonucleotide
ccuggaaggaagaugccuuau

SEQ ID NO: 1368 - RNA, 21 nt, Artificial Sequence
  Description of Artificial Sequence: Synthetic oligonucleotide
aaggcaucuuccuuccaggag

SEQ ID NO: 1369 - RNA, 21 nt, Artificial Sequence
  Description of Artificial Sequence: Synthetic oligonucleotide
cuggaaggaagaugccuuauu

SEQ ID NO: 1370 - RNA, 21 nt, Artificial Sequence
  Description of Artificial Sequence: Synthetic oligonucleotide
uaaggcaucuuccuuccagga

SEQ ID NO: 1371 - RNA, 21 nt, Artificial Sequence
  Description of Artificial Sequence: Synthetic oligonucleotide
uggaaggaagaugccuuauuu

SEQ ID NO: 1372 - RNA, 21 nt, Artificial Sequence
  Description of Artificial Sequence: Synthetic oligonucleotide
auaaggcaucuuccuuccagg

SEQ ID NO: 1373 - RNA, 21 nt, Artificial Sequence
  Description of Artificial Sequence: Synthetic oligonucleotide
ggaaggaagaugccuuauuug

SEQ ID NO: 1374 - RNA, 21 nt, Artificial Sequence
  Description of Artificial Sequence: Synthetic oligonucleotide
aauaaggcaucuuccuuccag

SEQ ID NO: 1375 - RNA, 21 nt, Artificial Sequence
  Description of Artificial Sequence: Synthetic oligonucleotide
gaaggaagaugccuuauuugg

SEQ ID NO: 1376 - RNA, 21 nt, Artificial Sequence
  Description of Artificial Sequence: Synthetic oligonucleotide
aaauaaggcaucuuccuucca

SEQ ID NO: 1377 - RNA, 21 nt, Artificial Sequence
  Description of Artificial Sequence: Synthetic oligonucleotide
aaggaagaugccuuauuuggg

SEQ ID NO: 1378 - RNA, 21 nt, Artificial Sequence
  Description of Artificial Sequence: Synthetic oligonucleotide
caaauaaggcaucuuccuucc

SEQ ID NO: 1379 - RNA, 21 nt, Artificial Sequence
  Description of Artificial Sequence: Synthetic oligonucleotide
aggaagaugccuuauuugggu

SEQ ID NO: 1380 - RNA, 21 nt, Artificial Sequence
  Description of Artificial Sequence: Synthetic oligonucleotide
ccaaauaaggcaucuuccuuc

SEQ ID NO: 1381 - RNA, 21 nt, Artificial Sequence
  Description of Artificial Sequence: Synthetic oligonucleotide
ggaagaugccuuauuugggua

SEQ ID NO: 1382 - RNA, 21 nt, Artificial Sequence
  Description of Artificial Sequence: Synthetic oligonucleotide
cccaaauaaggcaucuuccuu

SEQ ID NO: 1383 - RNA, 21 nt, Artificial Sequence
  Description of Artificial Sequence: Synthetic oligonucleotide
gaagaugccuuauuuggguac

SEQ ID NO: 1384 - RNA, 21 nt, Artificial Sequence
  Description of Artificial Sequence: Synthetic oligonucleotide
acccaaauaaggcaucuuccu

SEQ ID NO: 1385 - RNA, 21 nt, Artificial Sequence
  Description of Artificial Sequence: Synthetic oligonucleotide
aagaugccuuauuuggguacc

SEQ ID NO: 1386 - RNA, 21 nt, Artificial Sequence
  Description of Artificial Sequence: Synthetic oligonucleotide
uacccaaauaaggcaucuucc

SEQ ID NO: 1387 - RNA, 21 nt, Artificial Sequence
  Description of Artificial Sequence: Synthetic oligonucleotide
agaugccuuauuuggguacca

SEQ ID NO: 1388 - RNA, 21 nt, Artificial Sequence
  Description of Artificial Sequence: Synthetic oligonucleotide
guacccaaauaaggcaucuuc

SEQ ID NO: 1389 - RNA, 21 nt, Artificial Sequence
  Description of Artificial Sequence: Synthetic oligonucleotide
gaugccuuauuuggguaccag

SEQ ID NO: 1390 - RNA, 21 nt, Artificial Sequence
  Description of Artificial Sequence: Synthetic oligonucleotide
gguacccaaauaaggcaucuu

SEQ ID NO: 1391 - RNA, 21 nt, Artificial Sequence
  Description of Artificial Sequence: Synthetic oligonucleotide
augccuuauuuggguaccagu

SEQ ID NO: 1392 - RNA, 21 nt, Artificial Sequence
  Description of Artificial Sequence: Synthetic oligonucleotide
ugguacccaaauaaggcaucu

SEQ ID NO: 1393 - RNA, 21 nt, Artificial Sequence
  Description of Artificial Sequence: Synthetic oligonucleotide
ugccuuauuuggguaccaguu

SEQ ID NO: 1394 - RNA, 21 nt, Artificial Sequence
  Description of Artificial Sequence: Synthetic oligonucleotide
cugguacccaaauaaggcauc

SEQ ID NO: 1395 - RNA, 21 nt, Artificial Sequence
  Description of Artificial Sequence: Synthetic oligonucleotide
gccuuauuuggguaccaguuu

SEQ ID NO: 1396 - RNA, 21 nt, Artificial Sequence
  Description of Artificial Sequence: Synthetic oligonucleotide
acugguacccaaauaaggcau

SEQ ID NO: 1397 - RNA, 21 nt, Artificial Sequence
  Description of Artificial Sequence: Synthetic oligonucleotide
ccuuauuuggguaccaguuuc

SEQ ID NO: 1398 - RNA, 21 nt, Artificial Sequence
  Description of Artificial Sequence: Synthetic oligonucleotide
aacugguacccaaauaaggca

SEQ ID NO: 1399 - RNA, 21 nt, Artificial Sequence
  Description of Artificial Sequence: Synthetic oligonucleotide
cuuauuuggguaccaguuucu

SEQ ID NO: 1400 - RNA, 21 nt, Artificial Sequence
  Description of Artificial Sequence: Synthetic oligonucleotide
aaacugguacccaaauaaggc

SEQ ID NO: 1401 - RNA, 21 nt, Artificial Sequence
  Description of Artificial Sequence: Synthetic oligonucleotide
uuauuuggguaccaguuucuu

SEQ ID NO: 1402 - RNA, 21 nt, Artificial Sequence
  Description of Artificial Sequence: Synthetic oligonucleotide
gaaacugguacccaaauaagg

SEQ ID NO: 1403 - RNA, 21 nt, Artificial Sequence
  Description of Artificial Sequence: Synthetic oligonucleotide
uauuuggguaccaguuucuua

SEQ ID NO: 1404 - RNA, 21 nt, Artificial Sequence
  Description of Artificial Sequence: Synthetic oligonucleotide
agaaacugguacccaaauaag

SEQ ID NO: 1405 - RNA, 21 nt, Artificial Sequence
  Description of Artificial Sequence: Synthetic oligonucleotide
auuuggguaccaguuucuuaa

SEQ ID NO: 1406 - RNA, 21 nt, Artificial Sequence
  Description of Artificial Sequence: Synthetic oligonucleotide
aagaaacugguacccaaauaa

SEQ ID NO: 1407 - RNA, 21 nt, Artificial Sequence
  Description of Artificial Sequence: Synthetic oligonucleotide
uuuggguaccaguuucuuaau

SEQ ID NO: 1408 - RNA, 21 nt, Artificial Sequence
  Description of Artificial Sequence: Synthetic oligonucleotide
uaagaaacugguacccaaaua

SEQ ID NO: 1409 - RNA, 21 nt, Artificial Sequence
  Description of Artificial Sequence: Synthetic oligonucleotide
uuggguaccaguuucuuaaug

SEQ ID NO: 1410 - RNA, 21 nt, Artificial Sequence
  Description of Artificial Sequence: Synthetic oligonucleotide
uuaagaaacugguacccaaau

SEQ ID NO: 1411 - RNA, 21 nt, Artificial Sequence
  Description of Artificial Sequence: Synthetic oligonucleotide
uggguaccaguuucuuaaugg

SEQ ID NO: 1412 - RNA, 21 nt, Artificial Sequence
  Description of Artificial Sequence: Synthetic oligonucleotide
auuaagaaacugguacccaaa

SEQ ID NO: 1413 - RNA, 21 nt, Artificial Sequence
  Description of Artificial Sequence: Synthetic oligonucleotide
ggguaccaguuucuuaauggc

SEQ ID NO: 1414 - RNA, 21 nt, Artificial Sequence
  Description of Artificial Sequence: Synthetic oligonucleotide
cauuaagaaacugguacccaa

SEQ ID NO: 1415 - RNA, 21 nt, Artificial Sequence
  Description of Artificial Sequence: Synthetic oligonucleotide
gguaccaguuucuuaauggcg

SEQ ID NO: 1416 - RNA, 21 nt, Artificial Sequence
  Description of Artificial Sequence: Synthetic oligonucleotide
ccauuaagaaacugguaccca

SEQ ID NO: 1417 - RNA, 21 nt, Artificial Sequence
  Description of Artificial Sequence: Synthetic oligonucleotide
guaccaguuucuuaauggcgc

SEQ ID NO: 1418 - RNA, 21 nt, Artificial Sequence
  Description of Artificial Sequence: Synthetic oligonucleotide
gccauuaagaaacugguaccc

SEQ ID NO: 1419 - RNA, 21 nt, Artificial Sequence
  Description of Artificial Sequence: Synthetic oligonucleotide
uaccaguuucuuaauggcgcc

SEQ ID NO: 1420 - RNA, 21 nt, Artificial Sequence
  Description of Artificial Sequence: Synthetic oligonucleotide
cgccauuaagaaacugguacc

SEQ ID NO: 1421 - RNA, 21 nt, Artificial Sequence
  Description of Artificial Sequence: Synthetic oligonucleotide
accaguuucuuaauggcgcca

SEQ ID NO: 1422 - RNA, 21 nt, Artificial Sequence
  Description of Artificial Sequence: Synthetic oligonucleotide
gcgccauuaagaaacugguac

SEQ ID NO: 1423 - RNA, 21 nt, Artificial Sequence
  Description of Artificial Sequence: Synthetic oligonucleotide
ccaguuucuuaauggcgccaa

SEQ ID NO: 1424 - RNA, 21 nt, Artificial Sequence
  Description of Artificial Sequence: Synthetic oligonucleotide
ggcgccauuaagaaacuggua

SEQ ID NO: 1425 - RNA, 21 nt, Artificial Sequence
  Description of Artificial Sequence: Synthetic oligonucleotide
caguuucuuaauggcgccaac

SEQ ID NO: 1426 - RNA, 21 nt, Artificial Sequence
  Description of Artificial Sequence: Synthetic oligonucleotide
uggcgccauuaagaaacuggu

SEQ ID NO: 1427 - RNA, 21 nt, Artificial Sequence
  Description of Artificial Sequence: Synthetic oligonucleotide
aguuucuuaauggcgccaacc

SEQ ID NO: 1428 - RNA, 21 nt, Artificial Sequence
  Description of Artificial Sequence: Synthetic oligonucleotide
uuggcgccauuaagaaacugg

SEQ ID NO: 1429 - RNA, 21 nt, Artificial Sequence
  Description of Artificial Sequence: Synthetic oligonucleotide
guuucuuaauggcgccaaccc

SEQ ID NO: 1430 - RNA, 21 nt, Artificial Sequence
  Description of Artificial Sequence: Synthetic oligonucleotide
guuggcgccauuaagaaacug

SEQ ID NO: 1431 - RNA, 21 nt, Artificial Sequence
  Description of Artificial Sequence: Synthetic oligonucleotide
uuucuuaauggcgccaacccc

SEQ ID NO: 1432 - RNA, 21 nt, Artificial Sequence
  Description of Artificial Sequence: Synthetic oligonucleotide
gguuggcgccauuaagaaacu

SEQ ID NO: 1433 - RNA, 21 nt, Artificial Sequence
  Description of Artificial Sequence: Synthetic oligonucleotide
uucuuaauggcgccaaccccg

SEQ ID NO: 1434 - RNA, 21 nt, Artificial Sequence
  Description of Artificial Sequence: Synthetic oligonucleotide
ggguuggcgccauuaagaaac

SEQ ID NO: 1435 - RNA, 21 nt, Artificial Sequence
  Description of Artificial Sequence: Synthetic oligonucleotide
ucuuaauggcgccaaccccgu

SEQ ID NO: 1436 - RNA, 21 nt, Artificial Sequence
  Description of Artificial Sequence: Synthetic oligonucleotide
gggguuggcgccauuaagaaa

SEQ ID NO: 1437 - RNA, 21 nt, Artificial Sequence
  Description of Artificial Sequence: Synthetic oligonucleotide
cuuaauggcgccaaccccgug

SEQ ID NO: 1438 - RNA, 21 nt, Artificial Sequence
  Description of Artificial Sequence: Synthetic oligonucleotide
cgggguuggcgccauuaagaa

SEQ ID NO: 1439 - RNA, 21 nt, Artificial Sequence
  Description of Artificial Sequence: Synthetic oligonucleotide
uuaauggcgccaaccccgugg

SEQ ID NO: 1440 - RNA, 21 nt, Artificial Sequence
  Description of Artificial Sequence: Synthetic oligonucleotide
acgggguuggcgccauuaaga

SEQ ID NO: 1441 - RNA, 21 nt, Artificial Sequence
  Description of Artificial Sequence: Synthetic oligonucleotide
uaauggcgccaaccccguggu

SEQ ID NO: 1442 - RNA, 21 nt, Artificial Sequence
  Description of Artificial Sequence: Synthetic oligonucleotide
cacgggguuggcgccauuaag

SEQ ID NO: 1443 - RNA, 21 nt, Artificial Sequence
  Description of Artificial Sequence: Synthetic oligonucleotide
aauggcgccaaccccguggug

SEQ ID NO: 1444 - RNA, 21 nt, Artificial Sequence
  Description of Artificial Sequence: Synthetic oligonucleotide
ccacgggguuggcgccauuaa

SEQ ID NO: 1445 - RNA, 21 nt, Artificial Sequence
  Description of Artificial Sequence: Synthetic oligonucleotide
auggcgccaaccccguggugc

SEQ ID NO: 1446 - RNA, 21 nt, Artificial Sequence
  Description of Artificial Sequence: Synthetic oligonucleotide
accacgggguuggcgccauua

SEQ ID NO: 1447 - RNA, 21 nt, Artificial Sequence
  Description of Artificial Sequence: Synthetic oligonucleotide
uggcgccaaccccguggugcu

SEQ ID NO: 1448 - RNA, 21 nt, Artificial Sequence
  Description of Artificial Sequence: Synthetic oligonucleotide
caccacgggguuggcgccauu

SEQ ID NO: 1449 - RNA, 21 nt, Artificial Sequence
  Description of Artificial Sequence: Synthetic oligonucleotide
ggcgccaaccccguggugcug

SEQ ID NO: 1450 - RNA, 21 nt, Artificial Sequence
  Description of Artificial Sequence: Synthetic oligonucleotide
gcaccacgggguuggcgccau

SEQ ID NO: 1451 - RNA, 21 nt, Artificial Sequence
  Description of Artificial Sequence: Synthetic oligonucleotide
gcgccaaccccguggugcuga

SEQ ID NO: 1452 - RNA, 21 nt, Artificial Sequence
  Description of Artificial Sequence: Synthetic oligonucleotide
agcaccacgggguuggcgcca

SEQ ID NO: 1453 - RNA, 21 nt, Artificial Sequence
  Description of Artificial Sequence: Synthetic oligonucleotide
cgccaaccccguggugcugag

SEQ ID NO: 1454 - RNA, 21 nt, Artificial Sequence
  Description of Artificial Sequence: Synthetic oligonucleotide
cagcaccacgggguuggcgcc

SEQ ID NO: 1455 - RNA, 21 nt, Artificial Sequence
  Description of Artificial Sequence: Synthetic oligonucleotide
gccaaccccguggugcugagg

SEQ ID NO: 1456 - RNA, 21 nt, Artificial Sequence
  Description of Artificial Sequence: Synthetic oligonucleotide
ucagcaccacgggguuggcgc

SEQ ID NO: 1457 - RNA, 21 nt, Artificial Sequence
  Description of Artificial Sequence: Synthetic oligonucleotide
ccaaccccguggugcugaggc

SEQ ID NO: 1458 - RNA, 21 nt, Artificial Sequence
  Description of Artificial Sequence: Synthetic oligonucleotide
cucagcaccacgggguuggcg

SEQ ID NO: 1459 - RNA, 21 nt, Artificial Sequence
  Description of Artificial Sequence: Synthetic oligonucleotide
caaccccguggugcugaggcg

SEQ ID NO: 1460 - RNA, 21 nt, Artificial Sequence
  Description of Artificial Sequence: Synthetic oligonucleotide
ccucagcaccacgggguuggc

SEQ ID NO: 1461 - RNA, 21 nt, Artificial Sequence
  Description of Artificial Sequence: Synthetic oligonucleotide
aaccccguggugcugaggcgc

SEQ ID NO: 1462 - RNA, 21 nt, Artificial Sequence
  Description of Artificial Sequence: Synthetic oligonucleotide
gccucagcaccacgggguugg

SEQ ID NO: 1463 - RNA, 21 nt, Artificial Sequence
  Description of Artificial Sequence: Synthetic oligonucleotide
accccguggugcugaggcgcu

SEQ ID NO: 1464 - RNA, 21 nt, Artificial Sequence
  Description of Artificial Sequence: Synthetic oligonucleotide
cgccucagcaccacgggguug

SEQ ID NO: 1465 - RNA, 21 nt, Artificial Sequence
  Description of Artificial Sequence: Synthetic oligonucleotide
ccccguggugcugaggcgcuc

SEQ ID NO: 1466 - RNA, 21 nt, Artificial Sequence
  Description of Artificial Sequence: Synthetic oligonucleotide
gcgccucagcaccacgggguu

SEQ ID NO: 1467 - RNA, 21 nt, Artificial Sequence
  Description of Artificial Sequence: Synthetic oligonucleotide
cccguggugcugaggcgcucu

SEQ ID NO: 1468 - RNA, 21 nt, Artificial Sequence
  Description of Artificial Sequence: Synthetic oligonucleotide
agcgccucagcaccacggggu

SEQ ID NO: 1469 - RNA, 21 nt, Artificial Sequence
  Description of Artificial Sequence: Synthetic oligonucleotide
ccguggugcugaggcgcucug

SEQ ID NO: 1470 - RNA, 21 nt, Artificial Sequence
  Description of Artificial Sequence: Synthetic oligonucleotide
gagcgccucagcaccacgggg

SEQ ID NO: 1471 - RNA, 21 nt, Artificial Sequence
  Description of Artificial Sequence: Synthetic oligonucleotide
cguggugcugaggcgcucugc

SEQ ID NO: 1472 - RNA, 21 nt, Artificial Sequence
  Description of Artificial Sequence: Synthetic oligonucleotide
agagcgccucagcaccacggg

SEQ ID NO: 1473 - RNA, 21 nt, Artificial Sequence
  Description of Artificial Sequence: Synthetic oligonucleotide
guggugcugaggcgcucugcu

SEQ ID NO: 1474 - RNA, 21 nt, Artificial Sequence
  Description of Artificial Sequence: Synthetic oligonucleotide
cagagcgccucagcaccacgg

SEQ ID NO: 1475 - RNA, 21 nt, Artificial Sequence
  Description of Artificial Sequence: Synthetic oligonucleotide
uggugcugaggcgcucugcuc

SEQ ID NO: 1476 - RNA, 21 nt, Artificial Sequence
  Description of Artificial Sequence: Synthetic oligonucleotide
gcagagcgccucagcaccacg

SEQ ID NO: 1477 - RNA, 21 nt, Artificial Sequence
  Description of Artificial Sequence: Synthetic oligonucleotide
ggugcugaggcgcucugcuca

SEQ ID NO: 1478 - RNA, 21 nt, Artificial Sequence
  Description of Artificial Sequence: Synthetic oligonucleotide
agcagagcgccucagcaccac

SEQ ID NO: 1479 - RNA, 21 nt, Artificial Sequence
  Description of Artificial Sequence: Synthetic oligonucleotide
gugcugaggcgcucugcucac

SEQ ID NO: 1480 - RNA, 21 nt, Artificial Sequence
  Description of Artificial Sequence: Synthetic oligonucleotide
gagcagagcgccucagcacca

SEQ ID NO: 1481 - RNA, 21 nt, Artificial Sequence
  Description of Artificial Sequence: Synthetic oligonucleotide
ugcugaggcgcucugcucacc

SEQ ID NO: 1482 - RNA, 21 nt, Artificial Sequence
  Description of Artificial Sequence: Synthetic oligonucleotide
ugagcagagcgccucagcacc

SEQ ID NO: 1483 - RNA, 21 nt, Artificial Sequence
  Description of Artificial Sequence: Synthetic oligonucleotide
gcugaggcgcucugcucaccu

SEQ ID NO: 1484 - RNA, 21 nt, Artificial Sequence
  Description of Artificial Sequence: Synthetic oligonucleotide
gugagcagagcgccucagcac

SEQ ID NO: 1485 - RNA, 21 nt, Artificial Sequence
  Description of Artificial Sequence: Synthetic oligonucleotide
cugaggcgcucugcucaccuu

SEQ ID NO: 1486 - RNA, 21 nt, Artificial Sequence
  Description of Artificial Sequence: Synthetic oligonucleotide
ggugagcagagcgccucagca

SEQ ID NO: 1487 - RNA, 21 nt, Artificial Sequence
  Description of Artificial Sequence: Synthetic oligonucleotide
ugaggcgcucugcucaccuuc

SEQ ID NO: 1488 - RNA, 21 nt, Artificial Sequence
  Description of Artificial Sequence: Synthetic oligonucleotide
aggugagcagagcgccucagc

SEQ ID NO: 1489 - RNA, 21 nt, Artificial Sequence
  Description of Artificial Sequence: Synthetic oligonucleotide
gaggcgcucugcucaccuucc

SEQ ID NO: 1490 - RNA, 21 nt, Artificial Sequence
  Description of Artificial Sequence: Synthetic oligonucleotide
aaggugagcagagcgccucag

SEQ ID NO: 1491 - RNA, 21 nt, Artificial Sequence
  Description of Artificial Sequence: Synthetic oligonucleotide
aggcgcucugcucaccuuccu

SEQ ID NO: 1492 - RNA, 21 nt, Artificial Sequence
  Description of Artificial Sequence: Synthetic oligonucleotide
gaaggugagcagagcgccuca

SEQ ID NO: 1493 - RNA, 21 nt, Artificial Sequence
  Description of Artificial Sequence: Synthetic oligonucleotide
ggcgcucugcucaccuuccug

SEQ ID NO: 1494 - RNA, 21 nt, Artificial Sequence
  Description of Artificial Sequence: Synthetic oligonucleotide
ggaaggugagcagagcgccuc

SEQ ID NO: 1495 - RNA, 21 nt, Artificial Sequence
  Description of Artificial Sequence: Synthetic oligonucleotide
gcgcucugcucaccuuccugc

SEQ ID NO: 1496 - RNA, 21 nt, Artificial Sequence
  Description of Artificial Sequence: Synthetic oligonucleotide
aggaaggugagcagagcgccu

SEQ ID NO: 1497 - RNA, 21 nt, Artificial Sequence
  Description of Artificial Sequence: Synthetic oligonucleotide
cgcucugcucaccuuccugcu

SEQ ID NO: 1498 - RNA, 21 nt, Artificial Sequence
  Description of Artificial Sequence: Synthetic oligonucleotide
caggaaggugagcagagcgcc

SEQ ID NO: 1499 - RNA, 21 nt, Artificial Sequence
  Description of Artificial Sequence: Synthetic oligonucleotide
gcucugcucaccuuccugcuc

SEQ ID NO: 1500 - RNA, 21 nt, Artificial Sequence
  Description of Artificial Sequence: Synthetic oligonucleotide
gcaggaaggugagcagagcgc

SEQ ID NO: 1501 - RNA, 21 nt, Artificial Sequence
  Description of Artificial Sequence: Synthetic oligonucleotide
cucugcucaccuuccugcucg

SEQ ID NO: 1502 - RNA, 21 nt, Artificial Sequence
  Description of Artificial Sequence: Synthetic oligonucleotide
agcaggaaggugagcagagcg

SEQ ID NO: 1503 - RNA, 21 nt, Artificial Sequence
  Description of Artificial Sequence: Synthetic oligonucleotide
ucugcucaccuuccugcucgc

SEQ ID NO: 1504 - RNA, 21 nt, Artificial Sequence
  Description of Artificial Sequence: Synthetic oligonucleotide
gagcaggaaggugagcagagc

SEQ ID NO: 1505 - RNA, 21 nt, Artificial Sequence
  Description of Artificial Sequence: Synthetic oligonucleotide
cugcucaccuuccugcucgcc

SEQ ID NO: 1506 - RNA, 21 nt, Artificial Sequence
  Description of Artificial Sequence: Synthetic oligonucleotide
cgagcaggaaggugagcagag

SEQ ID NO: 1507 - RNA, 21 nt, Artificial Sequence
  Description of Artificial Sequence: Synthetic oligonucleotide
ugcucaccuuccugcucgccu

SEQ ID NO: 1508 - RNA, 21 nt, Artificial Sequence
  Description of Artificial Sequence: Synthetic oligonucleotide
gcgagcaggaaggugagcaga

SEQ ID NO: 1509 - RNA, 21 nt, Artificial Sequence
  Description of Artificial Sequence: Synthetic oligonucleotide
gcucaccuuccugcucgccua

SEQ ID NO: 1510 - RNA, 21 nt, Artificial Sequence
  Description of Artificial Sequence: Synthetic oligonucleotide
ggcgagcaggaaggugagcag

SEQ ID NO: 1511 - RNA, 21 nt, Artificial Sequence
  Description of Artificial Sequence: Synthetic oligonucleotide
cucaccuuccugcucgccuag

SEQ ID NO: 1512 - RNA, 21 nt, Artificial Sequence
  Description of Artificial Sequence: Synthetic oligonucleotide
aggcgagcaggaaggugagca

SEQ ID NO: 1513 - RNA, 21 nt, Artificial Sequence
  Description of Artificial Sequence: Synthetic oligonucleotide
ucaccuuccugcucgccuagu

SEQ ID NO: 1514 - RNA, 21 nt, Artificial Sequence
  Description of Artificial Sequence: Synthetic oligonucleotide
uaggcgagcaggaaggugagc

SEQ ID NO: 1515 - RNA, 21 nt, Artificial Sequence
  Description of Artificial Sequence: Synthetic oligonucleotide
caccuuccugcucgccuagug

SEQ ID NO: 1516 - RNA, 21 nt, Artificial Sequence
  Description of Artificial Sequence: Synthetic oligonucleotide
cuaggcgagcaggaaggugag

SEQ ID NO: 1517 - RNA, 21 nt, Artificial Sequence
  Description of Artificial Sequence: Synthetic oligonucleotide
accuuccugcucgccuagugu

SEQ ID NO: 1518 - RNA, 21 nt, Artificial Sequence
  Description of Artificial Sequence: Synthetic oligonucleotide
acuaggcgagcaggaagguga

SEQ ID NO: 1519 - RNA, 21 nt, Artificial Sequence
  Description of Artificial Sequence: Synthetic oligonucleotide
ccuuccugcucgccuaguguu

SEQ ID NO: 1520 - RNA, 21 nt, Artificial Sequence
  Description of Artificial Sequence: Synthetic oligonucleotide
cacuaggcgagcaggaaggug

SEQ ID NO: 1521 - RNA, 21 nt, Artificial Sequence
  Description of Artificial Sequence: Synthetic oligonucleotide
cuuccugcucgccuaguguuc

SEQ ID NO: 1522 - RNA, 21 nt, Artificial Sequence
  Description of Artificial Sequence: Synthetic oligonucleotide
acacuaggcgagcaggaaggu

SEQ ID NO: 1523 - RNA, 21 nt, Artificial Sequence
  Description of Artificial Sequence: Synthetic oligonucleotide
uuccugcucgccuaguguucc

SEQ ID NO: 1524 - RNA, 21 nt, Artificial Sequence
  Description of Artificial Sequence: Synthetic oligonucleotide
aacacuaggcgagcaggaagg

SEQ ID NO: 1525 - RNA, 21 nt, Artificial Sequence
  Description of Artificial Sequence: Synthetic oligonucleotide
uccugcucgccuaguguuccc

SEQ ID NO: 1526 - RNA, 21 nt, Artificial Sequence
  Description of Artificial Sequence: Synthetic oligonucleotide
gaacacuaggcgagcaggaag

SEQ ID NO: 1527 - RNA, 21 nt, Artificial Sequence
  Description of Artificial Sequence: Synthetic oligonucleotide
ccugcucgccuaguguucccu

SEQ ID NO: 1528 - RNA, 21 nt, Artificial Sequence
  Description of Artificial Sequence: Synthetic oligonucleotide
ggaacacuaggcgagcaggaa

SEQ ID NO: 1529 - RNA, 21 nt, Artificial Sequence
  Description of Artificial Sequence: Synthetic oligonucleotide
cugcucgccuaguguucccuc

SEQ ID NO: 1530 - RNA, 21 nt, Artificial Sequence
  Description of Artificial Sequence: Synthetic oligonucleotide
gggaacacuaggcgagcagga

SEQ ID NO: 1531 - RNA, 21 nt, Artificial Sequence
  Description of Artificial Sequence: Synthetic oligonucleotide
ugcucgccuaguguucccucc

SEQ ID NO: 1532 - RNA, 21 nt, Artificial Sequence
  Description of Artificial Sequence: Synthetic oligonucleotide
agggaacacuaggcgagcagg

SEQ ID NO: 1533 - RNA, 21 nt, Artificial Sequence
  Description of Artificial Sequence: Synthetic oligonucleotide
gcucgccuaguguucccucca

SEQ ID NO: 1534 - RNA, 21 nt, Artificial Sequence
  Description of Artificial Sequence: Synthetic oligonucleotide
gagggaacacuaggcgagcag

SEQ ID NO: 1535 - RNA, 21 nt, Artificial Sequence
  Description of Artificial Sequence: Synthetic oligonucleotide
cucgccuaguguucccuccag

SEQ ID NO: 1536 - RNA, 21 nt, Artificial Sequence
  Description of Artificial Sequence: Synthetic oligonucleotide
ggagggaacacuaggcgagca

SEQ ID NO: 1537 - RNA, 21 nt, Artificial Sequence
  Description of Artificial Sequence: Synthetic oligonucleotide
ucgccuaguguucccuccagg

SEQ ID NO: 1538 - RNA, 21 nt, Artificial Sequence
  Description of Artificial Sequence: Synthetic oligonucleotide
uggagggaacacuaggcgagc

SEQ ID NO: 1539 - RNA, 21 nt, Artificial Sequence
  Description of Artificial Sequence: Synthetic oligonucleotide
cgccuaguguucccuccaggc

SEQ ID NO: 1540 - RNA, 21 nt, Artificial Sequence
  Description of Artificial Sequence: Synthetic oligonucleotide
cuggagggaacacuaggcgag

SEQ ID NO: 1541 - RNA, 21 nt, Artificial Sequence
  Description of Artificial Sequence: Synthetic oligonucleotide
gccuaguguucccuccaggca

SEQ ID NO: 1542 - RNA, 21 nt, Artificial Sequence
  Description of Artificial Sequence: Synthetic oligonucleotide
ccuggagggaacacuaggcga

SEQ ID NO: 1543 - RNA, 21 nt, Artificial Sequence
  Description of Artificial Sequence: Synthetic oligonucleotide
ccuaguguucccuccaggcau

SEQ ID NO: 1544 - RNA, 21 nt, Artificial Sequence
  Description of Artificial Sequence: Synthetic oligonucleotide
gccuggagggaacacuaggcg

SEQ ID NO: 1545 - RNA, 21 nt, Artificial Sequence
  Description of Artificial Sequence: Synthetic oligonucleotide
cuaguguucccuccaggcaug

SEQ ID NO: 1546 - RNA, 21 nt, Artificial Sequence
  Description of Artificial Sequence: Synthetic oligonucleotide
ugccuggagggaacacuaggc

SEQ ID NO: 1547 - RNA, 21 nt, Artificial Sequence
  Description of Artificial Sequence: Synthetic oligonucleotide
uaguguucccuccaggcaugg

SEQ ID NO: 1548 - RNA, 21 nt, Artificial Sequence
  Description of Artificial Sequence: Synthetic oligonucleotide
augccuggagggaacacuagg

SEQ ID NO: 1549 - RNA, 21 nt, Artificial Sequence
  Description of Artificial Sequence: Synthetic oligonucleotide
aguguucccuccaggcaugga

SEQ ID NO: 1550 - RNA, 21 nt, Artificial Sequence
  Description of Artificial Sequence: Synthetic oligonucleotide
caugccuggagggaacacuag

SEQ ID NO: 1551 - RNA, 21 nt, Artificial Sequence
  Description of Artificial Sequence: Synthetic oligonucleotide
guguucccuccaggcauggag

SEQ ID NO: 1552 - RNA, 21 nt, Artificial Sequence
  Description of Artificial Sequence: Synthetic oligonucleotide
ccaugccuggagggaacacua

SEQ ID NO: 1553 - RNA, 21 nt, Artificial Sequence
  Description of Artificial Sequence: Synthetic oligonucleotide
uguucccuccaggcauggagg

SEQ ID NO: 1554 - RNA, 21 nt, Artificial Sequence
  Description of Artificial Sequence: Synthetic oligonucleotide
uccaugccuggagggaacacu

SEQ ID NO: 1555 - RNA, 21 nt, Artificial Sequence
  Description of Artificial Sequence: Synthetic oligonucleotide
guucccuccaggcauggagga

SEQ ID NO: 1556 - RNA, 21 nt, Artificial Sequence
  Description of Artificial Sequence: Synthetic oligonucleotide
cuccaugccuggagggaacac

SEQ ID NO: 1557 - RNA, 21 nt, Artificial Sequence
  Description of Artificial Sequence: Synthetic oligonucleotide
uucccuccaggcauggaggaa

SEQ ID NO: 1558 - RNA, 21 nt, Artificial Sequence
  Description of Artificial Sequence: Synthetic oligonucleotide
ccuccaugccuggagggaaca

SEQ ID NO: 1559 - RNA, 21 nt, Artificial Sequence
  Description of Artificial Sequence: Synthetic oligonucleotide
ucccuccaggcauggaggaac

SEQ ID NO: 1560 - RNA, 21 nt, Artificial Sequence
  Description of Artificial Sequence: Synthetic oligonucleotide
uccuccaugccuggagggaac

SEQ ID NO: 1561 - RNA, 21 nt, Artificial Sequence
  Description of Artificial Sequence: Synthetic oligonucleotide
cccuccaggcauggaggaacu

SEQ ID NO: 1562 - RNA, 21 nt, Artificial Sequence
  Description of Artificial Sequence: Synthetic oligonucleotide
uuccuccaugccuggagggaa

SEQ ID NO: 1563 - RNA, 21 nt, Artificial Sequence
  Description of Artificial Sequence: Synthetic oligonucleotide
ccuccaggcauggaggaacug

SEQ ID NO: 1564 - RNA, 21 nt, Artificial Sequence
  Description of Artificial Sequence: Synthetic oligonucleotide
guuccuccaugccuggaggga

SEQ ID NO: 1565 - RNA, 21 nt, Artificial Sequence
  Description of Artificial Sequence: Synthetic oligonucleotide
cuccaggcauggaggaacugc

SEQ ID NO: 1566 - RNA, 21 nt, Artificial Sequence
  Description of Artificial Sequence: Synthetic oligonucleotide
aguuccuccaugccuggaggg

SEQ ID NO: 1567 - RNA, 21 nt, Artificial Sequence
  Description of Artificial Sequence: Synthetic oligonucleotide
uccaggcauggaggaacugca

SEQ ID NO: 1568 - RNA, 21 nt, Artificial Sequence
  Description of Artificial Sequence: Synthetic oligonucleotide
caguuccuccaugccuggagg

SEQ ID NO: 1569 - RNA, 21 nt, Artificial Sequence
  Description of Artificial Sequence: Synthetic oligonucleotide
ccaggcauggaggaacugcag

SEQ ID NO: 1570 - RNA, 21 nt, Artificial Sequence
  Description of Artificial Sequence: Synthetic oligonucleotide
gcaguuccuccaugccuggag

SEQ ID NO: 1571 - RNA, 21 nt, Artificial Sequence
  Description of Artificial Sequence: Synthetic oligonucleotide
caggcauggaggaacugcagg

SEQ ID NO: 1572 - RNA, 21 nt, Artificial Sequence
  Description of Artificial Sequence: Synthetic oligonucleotide
ugcaguuccuccaugccugga

SEQ ID NO: 1573 - RNA, 21 nt, Artificial Sequence
  Description of Artificial Sequence: Synthetic oligonucleotide
aggcauggaggaacugcaggc

SEQ ID NO: 1574 - RNA, 21 nt, Artificial Sequence
  Description of Artificial Sequence: Synthetic oligonucleotide
cugcaguuccuccaugccugg

SEQ ID NO: 1575 - RNA, 21 nt, Artificial Sequence
  Description of Artificial Sequence: Synthetic oligonucleotide
ggcauggaggaacugcaggcc

SEQ ID NO: 1576 - RNA, 21 nt, Artificial Sequence
  Description of Artificial Sequence: Synthetic oligonucleotide
ccugcaguuccuccaugccug

SEQ ID NO: 1577 - RNA, 21 nt, Artificial Sequence
  Description of Artificial Sequence: Synthetic oligonucleotide
gcauggaggaacugcaggccc

SEQ ID NO: 1578 - RNA, 21 nt, Artificial Sequence
  Description of Artificial Sequence: Synthetic oligonucleotide
gccugcaguuccuccaugccu

SEQ ID NO: 1579 - RNA, 21 nt, Artificial Sequence
  Description of Artificial Sequence: Synthetic oligonucleotide
cauggaggaacugcaggccca

SEQ ID NO: 1580 - RNA, 21 nt, Artificial Sequence
  Description of Artificial Sequence: Synthetic oligonucleotide
ggccugcaguuccuccaugcc

SEQ ID NO: 1581 - RNA, 21 nt, Artificial Sequence
  Description of Artificial Sequence: Synthetic oligonucleotide
auggaggaacugcaggcccag

SEQ ID NO: 1582 - RNA, 21 nt, Artificial Sequence
  Description of Artificial Sequence: Synthetic oligonucleotide
gggccugcaguuccuccaugc

SEQ ID NO: 1583 - RNA, 21 nt, Artificial Sequence
  Description of Artificial Sequence: Synthetic oligonucleotide
uggaggaacugcaggcccagc

SEQ ID NO: 1584 - RNA, 21 nt, Artificial Sequence
  Description of Artificial Sequence: Synthetic oligonucleotide
ugggccugcaguuccuccaug

SEQ ID NO: 1585 - RNA, 21 nt, Artificial Sequence
  Description of Artificial Sequence: Synthetic oligonucleotide
ggaggaacugcaggcccagcu

SEQ ID NO: 1586 - RNA, 21 nt, Artificial Sequence
  Description of Artificial Sequence: Synthetic oligonucleotide
cugggccugcaguuccuccau

SEQ ID NO: 1587 - RNA, 21 nt, Artificial Sequence
  Description of Artificial Sequence: Synthetic oligonucleotide
gaggaacugcaggcccagcug

SEQ ID NO: 1588 - RNA, 21 nt, Artificial Sequence
  Description of Artificial Sequence: Synthetic oligonucleotide
gcugggccugcaguuccucca

SEQ ID NO: 1589 - RNA, 21 nt, Artificial Sequence
  Description of Artificial Sequence: Synthetic oligonucleotide
aggaacugcaggcccagcugg

SEQ ID NO: 1590 - RNA, 21 nt, Artificial Sequence
  Description of Artificial Sequence: Synthetic oligonucleotide
agcugggccugcaguuccucc

SEQ ID NO: 1591 - RNA, 21 nt, Artificial Sequence
  Description of Artificial Sequence: Synthetic oligonucleotide
ggaacugcaggcccagcugga

SEQ ID NO: 1592 - RNA, 21 nt, Artificial Sequence
  Description of Artificial Sequence: Synthetic oligonucleotide
cagcugggccugcaguuccuc

SEQ ID NO: 1593 - RNA, 21 nt, Artificial Sequence
  Description of Artificial Sequence: Synthetic oligonucleotide
gaacugcaggcccagcuggag

SEQ ID NO: 1594 - RNA, 21 nt, Artificial Sequence
  Description of Artificial Sequence: Synthetic oligonucleotide
ccagcugggccugcaguuccu

SEQ ID NO: 1595 - RNA, 21 nt, Artificial Sequence
  Description of Artificial Sequence: Synthetic oligonucleotide
aacugcaggcccagcuggaga

SEQ ID NO: 1596 - RNA, 21 nt, Artificial Sequence
  Description of Artificial Sequence: Synthetic oligonucleotide
uccagcugggccugcaguucc

SEQ ID NO: 1597 - RNA, 21 nt, Artificial Sequence
  Description of Artificial Sequence: Synthetic oligonucleotide
acugcaggcccagcuggagaa

SEQ ID NO: 1598 - RNA, 21 nt, Artificial Sequence
  Description of Artificial Sequence: Synthetic oligonucleotide
cuccagcugggccugcaguuc

SEQ ID NO: 1599 - RNA, 21 nt, Artificial Sequence
  Description of Artificial Sequence: Synthetic oligonucleotide
cugcaggcccagcuggagaag

SEQ ID NO: 1600 - RNA, 21 nt, Artificial Sequence
  Description of Artificial Sequence: Synthetic oligonucleotide
ucuccagcugggccugcaguu

SEQ ID NO: 1601 - RNA, 21 nt, Artificial Sequence
  Description of Artificial Sequence: Synthetic oligonucleotide
ugcaggcccagcuggagaagg

SEQ ID NO: 1602 - RNA, 21 nt, Artificial Sequence
  Description of Artificial Sequence: Synthetic oligonucleotide
uucuccagcugggccugcagu

SEQ ID NO: 1603 - RNA, 21 nt, Artificial Sequence
  Description of Artificial Sequence: Synthetic oligonucleotide
gcaggcccagcuggagaagga

SEQ ID NO: 1604 - RNA, 21 nt, Artificial Sequence
  Description of Artificial Sequence: Synthetic oligonucleotide
cuucuccagcugggccugcag

SEQ ID NO: 1605 - RNA, 21 nt, Artificial Sequence
  Description of Artificial Sequence: Synthetic oligonucleotide
caggcccagcuggagaaggag

SEQ ID NO: 1606 - RNA, 21 nt, Artificial Sequence
  Description of Artificial Sequence: Synthetic oligonucleotide
ccuucuccagcugggccugca

SEQ ID NO: 1607 - RNA, 21 nt, Artificial Sequence
  Description of Artificial Sequence: Synthetic oligonucleotide
aggcccagcuggagaaggagc

SEQ ID NO: 1608 - RNA, 21 nt, Artificial Sequence
  Description of Artificial Sequence: Synthetic oligonucleotide
uccuucuccagcugggccugc

SEQ ID NO: 1609 - RNA, 21 nt, Artificial Sequence
  Description of Artificial Sequence: Synthetic oligonucleotide
ggcccagcuggagaaggagcu

SEQ ID NO: 1610 - RNA, 21 nt, Artificial Sequence
  Description of Artificial Sequence: Synthetic oligonucleotide
cuccuucuccagcugggccug

SEQ ID NO: 1611 - RNA, 21 nt, Artificial Sequence
  Description of Artificial Sequence: Synthetic oligonucleotide
gcccagcuggagaaggagcug

SEQ ID NO: 1612 - RNA, 21 nt, Artificial Sequence
  Description of Artificial Sequence: Synthetic oligonucleotide
gcuccuucuccagcugggccu

SEQ ID NO: 1613 - RNA, 21 nt, Artificial Sequence
  Description of Artificial Sequence: Synthetic oligonucleotide
cccagcuggagaaggagcugg

SEQ ID NO: 1614 - RNA, 21 nt, Artificial Sequence
  Description of Artificial Sequence: Synthetic oligonucleotide
agcuccuucuccagcugggcc

SEQ ID NO: 1615 - RNA, 21 nt, Artificial Sequence
  Description of Artificial Sequence: Synthetic oligonucleotide
ccagcuggagaaggagcugga

SEQ ID NO: 1616 - RNA, 21 nt, Artificial Sequence
  Description of Artificial Sequence: Synthetic oligonucleotide
cagcuccuucuccagcugggc

SEQ ID NO: 1617 - RNA, 21 nt, Artificial Sequence
  Description of Artificial Sequence: Synthetic oligonucleotide
cagcuggagaaggagcuggag

SEQ ID NO: 1618 - RNA, 21 nt, Artificial Sequence
  Description of Artificial Sequence: Synthetic oligonucleotide
ccagcuccuucuccagcuggg

SEQ ID NO: 1619 - RNA, 21 nt, Artificial Sequence
  Description of Artificial Sequence: Synthetic oligonucleotide
agcuggagaaggagcuggagg

SEQ ID NO: 1620 - RNA, 21 nt, Artificial Sequence
  Description of Artificial Sequence: Synthetic oligonucleotide
uccagcuccuucuccagcugg

SEQ ID NO: 1621 - RNA, 21 nt, Artificial Sequence
  Description of Artificial Sequence: Synthetic oligonucleotide
gcuggagaaggagcuggaggg

SEQ ID NO: 1622 - RNA, 21 nt, Artificial Sequence
  Description of Artificial Sequence: Synthetic oligonucleotide
cuccagcuccuucuccagcug

SEQ ID NO: 1623 - RNA, 21 nt, Artificial Sequence
  Description of Artificial Sequence: Synthetic oligonucleotide
cuggagaaggagcuggaggga

SEQ ID NO: 1624 - RNA, 21 nt, Artificial Sequence
  Description of Artificial Sequence: Synthetic oligonucleotide
ccuccagcuccuucuccagcu

SEQ ID NO: 1625 - RNA, 21 nt, Artificial Sequence
  Description of Artificial Sequence: Synthetic oligonucleotide
uggagaaggagcuggagggag

SEQ ID NO: 1626 - RNA, 21 nt, Artificial Sequence
  Description of Artificial Sequence: Synthetic oligonucleotide
cccuccagcuccuucuccagc

SEQ ID NO: 1627 - RNA, 21 nt, Artificial Sequence
  Description of Artificial Sequence: Synthetic oligonucleotide
ggagaaggagcuggagggagg

SEQ ID NO: 1628 - RNA, 21 nt, Artificial Sequence
  Description of Artificial Sequence: Synthetic oligonucleotide
ucccuccagcuccuucuccag

SEQ ID NO: 1629 - RNA, 21 nt, Artificial Sequence
  Description of Artificial Sequence: Synthetic oligonucleotide
gagaaggagcuggagggaggc

SEQ ID NO: 1630 - RNA, 21 nt, Artificial Sequence
  Description of Artificial Sequence: Synthetic oligonucleotide
cucccuccagcuccuucucca

SEQ ID NO: 1631 - RNA, 21 nt, Artificial Sequence
  Description of Artificial Sequence: Synthetic oligonucleotide
agaaggagcuggagggaggca

SEQ ID NO: 1632 - RNA, 21 nt, Artificial Sequence
  Description of Artificial Sequence: Synthetic oligonucleotide
ccucccuccagcuccuucucc

SEQ ID NO: 1633 - RNA, 21 nt, Artificial Sequence
  Description of Artificial Sequence: Synthetic oligonucleotide
gaaggagcuggagggaggcac

SEQ ID NO: 1634 - RNA, 21 nt, Artificial Sequence
  Description of Artificial Sequence: Synthetic oligonucleotide
gccucccuccagcuccuucuc

SEQ ID NO: 1635 - RNA, 21 nt, Artificial Sequence
  Description of Artificial Sequence: Synthetic oligonucleotide
aaggagcuggagggaggcaca

SEQ ID NO: 1636 - RNA, 21 nt, Artificial Sequence
  Description of Artificial Sequence: Synthetic oligonucleotide
ugccucccuccagcuccuucu

SEQ ID NO: 1637 - RNA, 21 nt, Artificial Sequence
  Description of Artificial Sequence: Synthetic oligonucleotide
aggagcuggagggaggcacac

SEQ ID NO: 1638 - RNA, 21 nt, Artificial Sequence
  Description of Artificial Sequence: Synthetic oligonucleotide
gugccucccuccagcuccuuc

SEQ ID NO: 1639 - RNA, 21 nt, Artificial Sequence
  Description of Artificial Sequence: Synthetic oligonucleotide
ggagcuggagggaggcacacu

SEQ ID NO: 1640 - RNA, 21 nt, Artificial Sequence
  Description of Artificial Sequence: Synthetic oligonucleotide
ugugccucccuccagcuccuu

SEQ ID NO: 1641 - RNA, 21 nt, Artificial Sequence
  Description of Artificial Sequence: Synthetic oligonucleotide
gagcuggagggaggcacacug

SEQ ID NO: 1642 - RNA, 21 nt, Artificial Sequence
  Description of Artificial Sequence: Synthetic oligonucleotide
gugugccucccuccagcuccu

SEQ ID NO: 1643 - RNA, 21 nt, Artificial Sequence
  Description of Artificial Sequence: Synthetic oligonucleotide
agcuggagggaggcacacugu

SEQ ID NO: 1644 - RNA, 21 nt, Artificial Sequence
  Description of Artificial Sequence: Synthetic oligonucleotide
agugugccucccuccagcucc

SEQ ID NO: 1645 - RNA, 21 nt, Artificial Sequence
  Description of Artificial Sequence: Synthetic oligonucleotide
gcuggagggaggcacacuguu

SEQ ID NO: 1646 - RNA, 21 nt, Artificial Sequence
  Description of Artificial Sequence: Synthetic oligonucleotide
cagugugccucccuccagcuc

SEQ ID NO: 1647 - RNA, 21 nt, Artificial Sequence
  Description of Artificial Sequence: Synthetic oligonucleotide
cuggagggaggcacacuguuc

SEQ ID NO: 1648 - RNA, 21 nt, Artificial Sequence
  Description of Artificial Sequence: Synthetic oligonucleotide
acagugugccucccuccagcu

SEQ ID NO: 1649 - RNA, 21 nt, Artificial Sequence
  Description of Artificial Sequence: Synthetic oligonucleotide
uggagggaggcacacuguucg

SEQ ID NO: 1650 - RNA, 21 nt, Artificial Sequence
  Description of Artificial Sequence: Synthetic oligonucleotide
aacagugugccucccuccagc

SEQ ID NO: 1651 - RNA, 21 nt, Artificial Sequence
  Description of Artificial Sequence: Synthetic oligonucleotide
ggagggaggcacacuguucga

SEQ ID NO: 1652 - RNA, 21 nt, Artificial Sequence
  Description of Artificial Sequence: Synthetic oligonucleotide
gaacagugugccucccuccag

SEQ ID NO: 1653 - RNA, 21 nt, Artificial Sequence
  Description of Artificial Sequence: Synthetic oligonucleotide
gagggaggcacacuguucgaa

SEQ ID NO: 1654 - RNA, 21 nt, Artificial Sequence
  Description of Artificial Sequence: Synthetic oligonucleotide
cgaacagugugccucccucca

SEQ ID NO: 1655 - RNA, 21 nt, Artificial Sequence
  Description of Artificial Sequence: Synthetic oligonucleotide
agggaggcacacuguucgaag

SEQ ID NO: 1656 - RNA, 21 nt, Artificial Sequence
  Description of Artificial Sequence: Synthetic oligonucleotide
ucgaacagugugccucccucc

SEQ ID NO: 1657 - RNA, 21 nt, Artificial Sequence
  Description of Artificial Sequence: Synthetic oligonucleotide
gggaggcacacuguucgaagc

SEQ ID NO: 1658 - RNA, 21 nt, Artificial Sequence
  Description of Artificial Sequence: Synthetic oligonucleotide
uucgaacagugugccucccuc

SEQ ID NO: 1659 - RNA, 21 nt, Artificial Sequence
  Description of Artificial Sequence: Synthetic oligonucleotide
ggaggcacacuguucgaagcu

SEQ ID NO: 1660 - RNA, 21 nt, Artificial Sequence
  Description of Artificial Sequence: Synthetic oligonucleotide
cuucgaacagugugccucccu

SEQ ID NO: 1661 - RNA, 21 nt, Artificial Sequence
  Description of Artificial Sequence: Synthetic oligonucleotide
gaggcacacuguucgaagcug

SEQ ID NO: 1662 - RNA, 21 nt, Artificial Sequence
  Description of Artificial Sequence: Synthetic oligonucleotide
gcuucgaacagugugccuccc

SEQ ID NO: 1663 - RNA, 21 nt, Artificial Sequence
  Description of Artificial Sequence: Synthetic oligonucleotide
aggcacacuguucgaagcuga

SEQ ID NO: 1664 - RNA, 21 nt, Artificial Sequence
  Description of Artificial Sequence: Synthetic oligonucleotide
agcuucgaacagugugccucc

SEQ ID NO: 1665 - RNA, 21 nt, Artificial Sequence
  Description of Artificial Sequence: Synthetic oligonucleotide
ggcacacuguucgaagcugac

SEQ ID NO: 1666 - RNA, 21 nt, Artificial Sequence
  Description of Artificial Sequence: Synthetic oligonucleotide
cagcuucgaacagugugccuc

SEQ ID NO: 1667 - RNA, 21 nt, Artificial Sequence
  Description of Artificial Sequence: Synthetic oligonucleotide
gcacacuguucgaagcugacu

SEQ ID NO: 1668 - RNA, 21 nt, Artificial Sequence
  Description of Artificial Sequence: Synthetic oligonucleotide
ucagcuucgaacagugugccu

SEQ ID NO: 1669 - RNA, 21 nt, Artificial Sequence
  Description of Artificial Sequence: Synthetic oligonucleotide
cacacuguucgaagcugacuu

SEQ ID NO: 1670 - RNA, 21 nt, Artificial Sequence
  Description of Artificial Sequence: Synthetic oligonucleotide
gucagcuucgaacagugugcc

SEQ ID NO: 1671 - RNA, 21 nt, Artificial Sequence
  Description of Artificial Sequence: Synthetic oligonucleotide
acacuguucgaagcugacuuc

SEQ ID NO: 1672 - RNA, 21 nt, Artificial Sequence
  Description of Artificial Sequence: Synthetic oligonucleotide
agucagcuucgaacagugugc

SEQ ID NO: 1673 - RNA, 21 nt, Artificial Sequence
  Description of Artificial Sequence: Synthetic oligonucleotide
cacuguucgaagcugacuucu

SEQ ID NO: 1674 - RNA, 21 nt, Artificial Sequence
  Description of Artificial Sequence: Synthetic oligonucleotide
aagucagcuucgaacagugug

SEQ ID NO: 1675 - RNA, 21 nt, Artificial Sequence
  Description of Artificial Sequence: Synthetic oligonucleotide
acuguucgaagcugacuucuc

SEQ ID NO: 1676 - RNA, 21 nt, Artificial Sequence
  Description of Artificial Sequence: Synthetic oligonucleotide
gaagucagcuucgaacagugu

SEQ ID NO: 1677 - RNA, 21 nt, Artificial Sequence
  Description of Artificial Sequence: Synthetic oligonucleotide
cuguucgaagcugacuucucc

SEQ ID NO: 1678 - RNA, 21 nt, Artificial Sequence
  Description of Artificial Sequence: Synthetic oligonucleotide
agaagucagcuucgaacagug

SEQ ID NO: 1679 - RNA, 21 nt, Artificial Sequence
  Description of Artificial Sequence: Synthetic oligonucleotide
uguucgaagcugacuucuccc

SEQ ID NO: 1680 - RNA, 21 nt, Artificial Sequence
  Description of Artificial Sequence: Synthetic oligonucleotide
gagaagucagcuucgaacagu

SEQ ID NO: 1681 - RNA, 21 nt, Artificial Sequence
  Description of Artificial Sequence: Synthetic oligonucleotide
guucgaagcugacuucucccu

SEQ ID NO: 1682 - RNA, 21 nt, Artificial Sequence
  Description of Artificial Sequence: Synthetic oligonucleotide
ggagaagucagcuucgaacag

SEQ ID NO: 1683 - RNA, 21 nt, Artificial Sequence
  Description of Artificial Sequence: Synthetic oligonucleotide
uucgaagcugacuucucccug

SEQ ID NO: 1684 - RNA, 21 nt, Artificial Sequence
  Description of Artificial Sequence: Synthetic oligonucleotide
gggagaagucagcuucgaaca

SEQ ID NO: 1685 - RNA, 21 nt, Artificial Sequence
  Description of Artificial Sequence: Synthetic oligonucleotide
ucgaagcugacuucucccugc

SEQ ID NO: 1686 - RNA, 21 nt, Artificial Sequence
  Description of Artificial Sequence: Synthetic oligonucleotide
agggagaagucagcuucgaac

SEQ ID NO: 1687 - RNA, 21 nt, Artificial Sequence
  Description of Artificial Sequence: Synthetic oligonucleotide
cgaagcugacuucucccugcu

SEQ ID NO: 1688 - RNA, 21 nt, Artificial Sequence
  Description of Artificial Sequence: Synthetic oligonucleotide
cagggagaagucagcuucgaa

SEQ ID NO: 1689 - RNA, 21 nt, Artificial Sequence
  Description of Artificial Sequence: Synthetic oligonucleotide
gaagcugacuucucccugcug

SEQ ID NO: 1690 - RNA, 21 nt, Artificial Sequence
  Description of Artificial Sequence: Synthetic oligonucleotide
gcagggagaagucagcuucga

SEQ ID NO: 1691 - RNA, 21 nt, Artificial Sequence
  Description of Artificial Sequence: Synthetic oligonucleotide
aagcugacuucucccugcugg

SEQ ID NO: 1692 - RNA, 21 nt, Artificial Sequence
  Description of Artificial Sequence: Synthetic oligonucleotide
agcagggagaagucagcuucg

SEQ ID NO: 1693 - RNA, 21 nt, Artificial Sequence
  Description of Artificial Sequence: Synthetic oligonucleotide
agcugacuucucccugcugga

SEQ ID NO: 1694 - RNA, 21 nt, Artificial Sequence
  Description of Artificial Sequence: Synthetic oligonucleotide
cagcagggagaagucagcuuc

SEQ ID NO: 1695 - RNA, 21 nt, Artificial Sequence
  Description of Artificial Sequence: Synthetic oligonucleotide
gcugacuucucccugcuggau

SEQ ID NO: 1696 - RNA, 21 nt, Artificial Sequence
  Description of Artificial Sequence: Synthetic oligonucleotide
ccagcagggagaagucagcuu

SEQ ID NO: 1697 - RNA, 21 nt, Artificial Sequence
  Description of Artificial Sequence: Synthetic oligonucleotide
cugacuucucccugcuggaug

SEQ ID NO: 1698 - RNA, 21 nt, Artificial Sequence
  Description of Artificial Sequence: Synthetic oligonucleotide
uccagcagggagaagucagcu

SEQ ID NO: 1699 - RNA, 21 nt, Artificial Sequence
  Description of Artificial Sequence: Synthetic oligonucleotide
ugacuucucccugcuggaugg

SEQ ID NO: 1700 - RNA, 21 nt, Artificial Sequence
  Description of Artificial Sequence: Synthetic oligonucleotide
auccagcagggagaagucagc

SEQ ID NO: 1701 - RNA, 21 nt, Artificial Sequence
  Description of Artificial Sequence: Synthetic oligonucleotide
gacuucucccugcuggauggg

SEQ ID NO: 1702 - RNA, 21 nt, Artificial Sequence
  Description of Artificial Sequence: Synthetic oligonucleotide
cauccagcagggagaagucag

SEQ ID NO: 1703 - RNA, 21 nt, Artificial Sequence
  Description of Artificial Sequence: Synthetic oligonucleotide
acuucucccugcuggauggga

SEQ ID NO: 1704 - RNA, 21 nt, Artificial Sequence
  Description of Artificial Sequence: Synthetic oligonucleotide
ccauccagcagggagaaguca

SEQ ID NO: 1705 - RNA, 21 nt, Artificial Sequence
  Description of Artificial Sequence: Synthetic oligonucleotide
cuucucccugcuggaugggau

SEQ ID NO: 1706 - RNA, 21 nt, Artificial Sequence
  Description of Artificial Sequence: Synthetic oligonucleotide
cccauccagcagggagaaguc

SEQ ID NO: 1707 - RNA, 21 nt, Artificial Sequence
  Description of Artificial Sequence: Synthetic oligonucleotide
uucucccugcuggaugggauc

SEQ ID NO: 1708 - RNA, 21 nt, Artificial Sequence
  Description of Artificial Sequence: Synthetic oligonucleotide
ucccauccagcagggagaagu

SEQ ID NO: 1709 - RNA, 21 nt, Artificial Sequence
  Description of Artificial Sequence: Synthetic oligonucleotide
ucucccugcuggaugggauca

SEQ ID NO: 1710 - RNA, 21 nt, Artificial Sequence
  Description of Artificial Sequence: Synthetic oligonucleotide
aucccauccagcagggagaag

SEQ ID NO: 1711 - RNA, 21 nt, Artificial Sequence
  Description of Artificial Sequence: Synthetic oligonucleotide
cucccugcuggaugggaucaa

SEQ ID NO: 1712 - RNA, 21 nt, Artificial Sequence
  Description of Artificial Sequence: Synthetic oligonucleotide
gaucccauccagcagggagaa

SEQ ID NO: 1713 - RNA, 21 nt, Artificial Sequence
  Description of Artificial Sequence: Synthetic oligonucleotide
ucccugcuggaugggaucaag

SEQ ID NO: 1714 - RNA, 21 nt, Artificial Sequence
  Description of Artificial Sequence: Synthetic oligonucleotide
ugaucccauccagcagggaga

SEQ ID NO: 1715 - RNA, 21 nt, Artificial Sequence
  Description of Artificial Sequence: Synthetic oligonucleotide
cccugcuggaugggaucaagg

SEQ ID NO: 1716 - RNA, 21 nt, Artificial Sequence
  Description of Artificial Sequence: Synthetic oligonucleotide
uugaucccauccagcagggag

SEQ ID NO: 1717 - RNA, 21 nt, Artificial Sequence
  Description of Artificial Sequence: Synthetic oligonucleotide
ccugcuggaugggaucaaggc

SEQ ID NO: 1718 - RNA, 21 nt, Artificial Sequence
  Description of Artificial Sequence: Synthetic oligonucleotide
cuugaucccauccagcaggga

SEQ ID NO: 1719 - RNA, 21 nt, Artificial Sequence
  Description of Artificial Sequence: Synthetic oligonucleotide
cugcuggaugggaucaaggcc

SEQ ID NO: 1720 - RNA, 21 nt, Artificial Sequence
  Description of Artificial Sequence: Synthetic oligonucleotide
ccuugaucccauccagcaggg

SEQ ID NO: 1721 - RNA, 21 nt, Artificial Sequence
  Description of Artificial Sequence: Synthetic oligonucleotide
ugcuggaugggaucaaggcca

SEQ ID NO: 1722 - RNA, 21 nt, Artificial Sequence
  Description of Artificial Sequence: Synthetic oligonucleotide
gccuugaucccauccagcagg

SEQ ID NO: 1723 - RNA, 21 nt, Artificial Sequence
  Description of Artificial Sequence: Synthetic oligonucleotide
gcuggaugggaucaaggccaa

SEQ ID NO: 1724 - RNA, 21 nt, Artificial Sequence
  Description of Artificial Sequence: Synthetic oligonucleotide
ggccuugaucccauccagcag

SEQ ID NO: 1725 - RNA, 21 nt, Artificial Sequence
  Description of Artificial Sequence: Synthetic oligonucleotide
cuggaugggaucaaggccaac

SEQ ID NO: 1726 - RNA, 21 nt, Artificial Sequence
  Description of Artificial Sequence: Synthetic oligonucleotide
uggccuugaucccauccagca

SEQ ID NO: 1727 - RNA, 21 nt, Artificial Sequence
  Description of Artificial Sequence: Synthetic oligonucleotide
uggaugggaucaaggccaacg

SEQ ID NO: 1728 - RNA, 21 nt, Artificial Sequence
  Description of Artificial Sequence: Synthetic oligonucleotide
uuggccuugaucccauccagc

SEQ ID NO: 1729 - RNA, 21 nt, Artificial Sequence
  Description of Artificial Sequence: Synthetic oligonucleotide
ggaugggaucaaggccaacgu

SEQ ID NO: 1730 - RNA, 21 nt, Artificial Sequence
  Description of Artificial Sequence: Synthetic oligonucleotide
guuggccuugaucccauccag

SEQ ID NO: 1731 - RNA, 21 nt, Artificial Sequence
  Description of Artificial Sequence: Synthetic oligonucleotide
gaugggaucaaggccaacguc

SEQ ID NO: 1732 - RNA, 21 nt, Artificial Sequence
  Description of Artificial Sequence: Synthetic oligonucleotide
cguuggccuugaucccaucca

SEQ ID NO: 1733 - RNA, 21 nt, Artificial Sequence
  Description of Artificial Sequence: Synthetic oligonucleotide
augggaucaaggccaacguca

SEQ ID NO: 1734 - RNA, 21 nt, Artificial Sequence
  Description of Artificial Sequence: Synthetic oligonucleotide
acguuggccuugaucccaucc

SEQ ID NO: 1735 - RNA, 21 nt, Artificial Sequence
  Description of Artificial Sequence: Synthetic oligonucleotide
ugggaucaaggccaacgucau

SEQ ID NO: 1736 - RNA, 21 nt, Artificial Sequence
  Description of Artificial Sequence: Synthetic oligonucleotide
gacguuggccuugaucccauc

SEQ ID NO: 1737 - RNA, 21 nt, Artificial Sequence
  Description of Artificial Sequence: Synthetic oligonucleotide
gggaucaaggccaacgucauu

SEQ ID NO: 1738 - RNA, 21 nt, Artificial Sequence
  Description of Artificial Sequence: Synthetic oligonucleotide
ugacguuggccuugaucccau

SEQ ID NO: 1739 - RNA, 21 nt, Artificial Sequence
  Description of Artificial Sequence: Synthetic oligonucleotide
ggaucaaggccaacgucauuc

SEQ ID NO: 1740 - RNA, 21 nt, Artificial Sequence
  Description of Artificial Sequence: Synthetic oligonucleotide
augacguuggccuugauccca

SEQ ID NO: 1741 - RNA, 21 nt, Artificial Sequence
  Description of Artificial Sequence: Synthetic oligonucleotide
gaucaaggccaacgucauucu

SEQ ID NO: 1742 - RNA, 21 nt, Artificial Sequence
  Description of Artificial Sequence: Synthetic oligonucleotide
aaugacguuggccuugauccc

SEQ ID NO: 1743 - RNA, 21 nt, Artificial Sequence
  Description of Artificial Sequence: Synthetic oligonucleotide
aucaaggccaacgucauucuc

SEQ ID NO: 1744 - RNA, 21 nt, Artificial Sequence
  Description of Artificial Sequence: Synthetic oligonucleotide
gaaugacguuggccuugaucc

SEQ ID NO: 1745 - RNA, 21 nt, Artificial Sequence
  Description of Artificial Sequence: Synthetic oligonucleotide
ucaaggccaacgucauucucu

SEQ ID NO: 1746 - RNA, 21 nt, Artificial Sequence
  Description of Artificial Sequence: Synthetic oligonucleotide
agaaugacguuggccuugauc

SEQ ID NO: 1747 - RNA, 21 nt, Artificial Sequence
  Description of Artificial Sequence: Synthetic oligonucleotide
caaggccaacgucauucucug

SEQ ID NO: 1748 - RNA, 21 nt, Artificial Sequence
  Description of Artificial Sequence: Synthetic oligonucleotide
gagaaugacguuggccuugau

SEQ ID NO: 1749 - RNA, 21 nt, Artificial Sequence
  Description of Artificial Sequence: Synthetic oligonucleotide
aaggccaacgucauucucugu

SEQ ID NO: 1750 - RNA, 21 nt, Artificial Sequence
  Description of Artificial Sequence: Synthetic oligonucleotide
agagaaugacguuggccuuga

SEQ ID NO: 1751 - RNA, 21 nt, Artificial Sequence
  Description of Artificial Sequence: Synthetic oligonucleotide
aggccaacgucauucucugua

SEQ ID NO: 1752 - RNA, 21 nt, Artificial Sequence
  Description of Artificial Sequence: Synthetic oligonucleotide
cagagaaugacguuggccuug

SEQ ID NO: 1753 - RNA, 21 nt, Artificial Sequence
  Description of Artificial Sequence: Synthetic oligonucleotide
ggccaacgucauucucuguag

SEQ ID NO: 1754 - RNA, 21 nt, Artificial Sequence
  Description of Artificial Sequence: Synthetic oligonucleotide
acagagaaugacguuggccuu

SEQ ID NO: 1755 - RNA, 21 nt, Artificial Sequence
  Description of Artificial Sequence: Synthetic oligonucleotide
gccaacgucauucucuguagc

SEQ ID NO: 1756 - RNA, 21 nt, Artificial Sequence
  Description of Artificial Sequence: Synthetic oligonucleotide
uacagagaaugacguuggccu

SEQ ID NO: 1757 - RNA, 21 nt, Artificial Sequence
  Description of Artificial Sequence: Synthetic oligonucleotide
ccaacgucauucucuguagcc

SEQ ID NO: 1758 - RNA, 21 nt, Artificial Sequence
  Description of Artificial Sequence: Synthetic oligonucleotide
cuacagagaaugacguuggcc

SEQ ID NO: 1759 - RNA, 21 nt, Artificial Sequence
  Description of Artificial Sequence: Synthetic oligonucleotide
caacgucauucucuguagcca

SEQ ID NO: 1760 - RNA, 21 nt, Artificial Sequence
  Description of Artificial Sequence: Synthetic oligonucleotide
gcuacagagaaugacguuggc

SEQ ID NO: 1761 - RNA, 21 nt, Artificial Sequence
  Description of Artificial Sequence: Synthetic oligonucleotide
aacgucauucucuguagccag

SEQ ID NO: 1762 - RNA, 21 nt, Artificial Sequence
  Description of Artificial Sequence: Synthetic oligonucleotide
ggcuacagagaaugacguugg

SEQ ID NO: 1763 - RNA, 21 nt, Artificial Sequence
  Description of Artificial Sequence: Synthetic oligonucleotide
acgucauucucuguagccagc

SEQ ID NO: 1764 - RNA, 21 nt, Artificial Sequence
  Description of Artificial Sequence: Synthetic oligonucleotide
uggcuacagagaaugacguug

SEQ ID NO: 1765 - RNA, 21 nt, Artificial Sequence
  Description of Artificial Sequence: Synthetic oligonucleotide
cgucauucucuguagccagca

SEQ ID NO: 1766 - RNA, 21 nt, Artificial Sequence
  Description of Artificial Sequence: Synthetic oligonucleotide
cuggcuacagagaaugacguu

SEQ ID NO: 1767 - RNA, 21 nt, Artificial Sequence
  Description of Artificial Sequence: Synthetic oligonucleotide
gucauucucuguagccagcag

SEQ ID NO: 1768 - RNA, 21 nt, Artificial Sequence
  Description of Artificial Sequence: Synthetic oligonucleotide
gcuggcuacagagaaugacgu

SEQ ID NO: 1769 - RNA, 21 nt, Artificial Sequence
  Description of Artificial Sequence: Synthetic oligonucleotide
ucauucucuguagccagcagc

SEQ ID NO: 1770 - RNA, 21 nt, Artificial Sequence
  Description of Artificial Sequence: Synthetic oligonucleotide
ugcuggcuacagagaaugacg

SEQ ID NO: 1771 - RNA, 21 nt, Artificial Sequence
  Description of Artificial Sequence: Synthetic oligonucleotide
cauucucuguagccagcagca

SEQ ID NO: 1772 - RNA, 21 nt, Artificial Sequence
  Description of Artificial Sequence: Synthetic oligonucleotide
cugcuggcuacagagaaugac

SEQ ID NO: 1773 - RNA, 21 nt, Artificial Sequence
  Description of Artificial Sequence: Synthetic oligonucleotide
auucucuguagccagcagcac

SEQ ID NO: 1774 - RNA, 21 nt, Artificial Sequence
  Description of Artificial Sequence: Synthetic oligonucleotide
gcugcuggcuacagagaauga

SEQ ID NO: 1775 - RNA, 21 nt, Artificial Sequence
  Description of Artificial Sequence: Synthetic oligonucleotide
uucucuguagccagcagcacc

SEQ ID NO: 1776 - RNA, 21 nt, Artificial Sequence
  Description of Artificial Sequence: Synthetic oligonucleotide
ugcugcuggcuacagagaaug

SEQ ID NO: 1777 - RNA, 21 nt, Artificial Sequence
  Description of Artificial Sequence: Synthetic oligonucleotide
ucucuguagccagcagcaccu

SEQ ID NO: 1778 - RNA, 21 nt, Artificial Sequence
  Description of Artificial Sequence: Synthetic oligonucleotide
gugcugcuggcuacagagaau

SEQ ID NO: 1779 - RNA, 21 nt, Artificial Sequence
  Description of Artificial Sequence: Synthetic oligonucleotide
cucuguagccagcagcaccug

SEQ ID NO: 1780 - RNA, 21 nt, Artificial Sequence
  Description of Artificial Sequence: Synthetic oligonucleotide
ggugcugcuggcuacagagaa

SEQ ID NO: 1781 - RNA, 21 nt, Artificial Sequence
  Description of Artificial Sequence: Synthetic oligonucleotide
ucuguagccagcagcaccugg

SEQ ID NO: 1782 - RNA, 21 nt, Artificial Sequence
  Description of Artificial Sequence: Synthetic oligonucleotide
aggugcugcuggcuacagaga

SEQ ID NO: 1783 - RNA, 21 nt, Artificial Sequence
  Description of Artificial Sequence: Synthetic oligonucleotide
cuguagccagcagcaccuggc

SEQ ID NO: 1784 - RNA, 21 nt, Artificial Sequence
  Description of Artificial Sequence: Synthetic oligonucleotide
caggugcugcuggcuacagag

SEQ ID NO: 1785 - RNA, 21 nt, Artificial Sequence
  Description of Artificial Sequence: Synthetic oligonucleotide
uguagccagcagcaccuggcu

SEQ ID NO: 1786 - RNA, 21 nt, Artificial Sequence
  Description of Artificial Sequence: Synthetic oligonucleotide
ccaggugcugcuggcuacaga

SEQ ID NO: 1787 - RNA, 21 nt, Artificial Sequence
  Description of Artificial Sequence: Synthetic oligonucleotide
guagccagcagcaccuggcug

SEQ ID NO: 1788 - RNA, 21 nt, Artificial Sequence
  Description of Artificial Sequence: Synthetic oligonucleotide
gccaggugcugcuggcuacag

SEQ ID NO: 1789 - RNA, 21 nt, Artificial Sequence
  Description of Artificial Sequence: Synthetic oligonucleotide
uagccagcagcaccuggcugc

SEQ ID NO: 1790 - RNA, 21 nt, Artificial Sequence
  Description of Artificial Sequence: Synthetic oligonucleotide
agccaggugcugcuggcuaca

SEQ ID NO: 1791 - RNA, 21 nt, Artificial Sequence
  Description of Artificial Sequence: Synthetic oligonucleotide
agccagcagcaccuggcugcc

SEQ ID NO: 1792 - RNA, 21 nt, Artificial Sequence
  Description of Artificial Sequence: Synthetic oligonucleotide
cagccaggugcugcuggcuac

SEQ ID NO: 1793 - RNA, 21 nt, Artificial Sequence
  Description of Artificial Sequence: Synthetic oligonucleotide
gccagcagcaccuggcugccc

SEQ ID NO: 1794 - RNA, 21 nt, Artificial Sequence
  Description of Artificial Sequence: Synthetic oligonucleotide
gcagccaggugcugcuggcua

SEQ ID NO: 1795 - RNA, 21 nt, Artificial Sequence
  Description of Artificial Sequence: Synthetic oligonucleotide
ccagcagcaccuggcugcccc

SEQ ID NO: 1796 - RNA, 21 nt, Artificial Sequence
  Description of Artificial Sequence: Synthetic oligonucleotide
ggcagccaggugcugcuggcu

SEQ ID NO: 1797 - RNA, 21 nt, Artificial Sequence
  Description of Artificial Sequence: Synthetic oligonucleotide
cagcagcaccuggcugccccu

SEQ ID NO: 1798 - RNA, 21 nt, Artificial Sequence
  Description of Artificial Sequence: Synthetic oligonucleotide
gggcagccaggugcugcuggc

SEQ ID NO: 1799 - RNA, 21 nt, Artificial Sequence
  Description of Artificial Sequence: Synthetic oligonucleotide
agcagcaccuggcugccccuc

SEQ ID NO: 1800 - RNA, 21 nt, Artificial Sequence
  Description of Artificial Sequence: Synthetic oligonucleotide
ggggcagccaggugcugcugg

SEQ ID NO: 1801 - RNA, 21 nt, Artificial Sequence
  Description of Artificial Sequence: Synthetic oligonucleotide
gcagcaccuggcugccccucu

SEQ ID NO: 1802 - RNA, 21 nt, Artificial Sequence
  Description of Artificial Sequence: Synthetic oligonucleotide
aggggcagccaggugcugcug

SEQ ID NO: 1803 - RNA, 21 nt, Artificial Sequence
  Description of Artificial Sequence: Synthetic oligonucleotide
cagcaccuggcugccccucua

SEQ ID NO: 1804 - RNA, 21 nt, Artificial Sequence
  Description of Artificial Sequence: Synthetic oligonucleotide
gaggggcagccaggugcugcu

SEQ ID NO: 1805 - RNA, 21 nt, Artificial Sequence
  Description of Artificial Sequence: Synthetic oligonucleotide
agcaccuggcugccccucuag

SEQ ID NO: 1806 - RNA, 21 nt, Artificial Sequence
  Description of Artificial Sequence: Synthetic oligonucleotide
agaggggcagccaggugcugc

SEQ ID NO: 1807 - RNA, 21 nt, Artificial Sequence
  Description of Artificial Sequence: Synthetic oligonucleotide
gcaccuggcugccccucuagu

SEQ ID NO: 1808 - RNA, 21 nt, Artificial Sequence
  Description of Artificial Sequence: Synthetic oligonucleotide
uagaggggcagccaggugcug

SEQ ID NO: 1809 - RNA, 21 nt, Artificial Sequence
  Description of Artificial Sequence: Synthetic oligonucleotide
caccuggcugccccucuaguc

SEQ ID NO: 1810 - RNA, 21 nt, Artificial Sequence
  Description of Artificial Sequence: Synthetic oligonucleotide
cuagaggggcagccaggugcu

SEQ ID NO: 1811 - RNA, 21 nt, Artificial Sequence
  Description of Artificial Sequence: Synthetic oligonucleotide
accuggcugccccucuaguca

SEQ ID NO: 1812 - RNA, 21 nt, Artificial Sequence
  Description of Artificial Sequence: Synthetic oligonucleotide
acuagaggggcagccaggugc

SEQ ID NO: 1813 - RNA, 21 nt, Artificial Sequence
  Description of Artificial Sequence: Synthetic oligonucleotide
ccuggcugccccucuagucau

SEQ ID NO: 1814 - RNA, 21 nt, Artificial Sequence
  Description of Artificial Sequence: Synthetic oligonucleotide
gacuagaggggcagccaggug

SEQ ID NO: 1815 - RNA, 21 nt, Artificial Sequence
  Description of Artificial Sequence: Synthetic oligonucleotide
cuggcugccccucuagucaug

SEQ ID NO: 1816 - RNA, 21 nt, Artificial Sequence
  Description of Artificial Sequence: Synthetic oligonucleotide
ugacuagaggggcagccaggu

SEQ ID NO: 1817 - RNA, 21 nt, Artificial Sequence
  Description of Artificial Sequence: Synthetic oligonucleotide
uggcugccccucuagucaugc

SEQ ID NO: 1818 - RNA, 21 nt, Artificial Sequence
  Description of Artificial Sequence: Synthetic oligonucleotide
augacuagaggggcagccagg

SEQ ID NO: 1819 - RNA, 21 nt, Artificial Sequence
  Description of Artificial Sequence: Synthetic oligonucleotide
ggcugccccucuagucaugcu

SEQ ID NO: 1820 - RNA, 21 nt, Artificial Sequence
  Description of Artificial Sequence: Synthetic oligonucleotide
caugacuagaggggcagccag

SEQ ID NO: 1821 - RNA, 21 nt, Artificial Sequence
  Description of Artificial Sequence: Synthetic oligonucleotide
gcugccccucuagucaugcug

SEQ ID NO: 1822 - RNA, 21 nt, Artificial Sequence
  Description of Artificial Sequence: Synthetic oligonucleotide
gcaugacuagaggggcagcca

SEQ ID NO: 1823 - RNA, 21 nt, Artificial Sequence
  Description of Artificial Sequence: Synthetic oligonucleotide
cugccccucuagucaugcuga

SEQ ID NO: 1824 - RNA, 21 nt, Artificial Sequence
  Description of Artificial Sequence: Synthetic oligonucleotide
agcaugacuagaggggcagcc

SEQ ID NO: 1825 - RNA, 21 nt, Artificial Sequence
  Description of Artificial Sequence: Synthetic oligonucleotide
ugccccucuagucaugcugaa

SEQ ID NO: 1826 - RNA, 21 nt, Artificial Sequence
  Description of Artificial Sequence: Synthetic oligonucleotide
cagcaugacuagaggggcagc

SEQ ID NO: 1827 - RNA, 21 nt, Artificial Sequence
  Description of Artificial Sequence: Synthetic oligonucleotide
gccccucuagucaugcugaaa

SEQ ID NO: 1828 - RNA, 21 nt, Artificial Sequence
  Description of Artificial Sequence: Synthetic oligonucleotide
ucagcaugacuagaggggcag

SEQ ID NO: 1829 - RNA, 21 nt, Artificial Sequence
  Description of Artificial Sequence: Synthetic oligonucleotide
ccccucuagucaugcugaaau

SEQ ID NO: 1830 - RNA, 21 nt, Artificial Sequence
  Description of Artificial Sequence: Synthetic oligonucleotide
uucagcaugacuagaggggca

SEQ ID NO: 1831 - RNA, 21 nt, Artificial Sequence
  Description of Artificial Sequence: Synthetic oligonucleotide
cccucuagucaugcugaaauu

SEQ ID NO: 1832 - RNA, 21 nt, Artificial Sequence
  Description of Artificial Sequence: Synthetic oligonucleotide
uuucagcaugacuagaggggc

SEQ ID NO: 1833 - RNA, 21 nt, Artificial Sequence
  Description of Artificial Sequence: Synthetic oligonucleotide
ccucuagucaugcugaaauug

SEQ ID NO: 1834 - RNA, 21 nt, Artificial Sequence
  Description of Artificial Sequence: Synthetic oligonucleotide
auuucagcaugacuagagggg

SEQ ID NO: 1835 - RNA, 21 nt, Artificial Sequence
  Description of Artificial Sequence: Synthetic oligonucleotide
cucuagucaugcugaaauugc

SEQ ID NO: 1836 - RNA, 21 nt, Artificial Sequence
  Description of Artificial Sequence: Synthetic oligonucleotide
aauuucagcaugacuagaggg

SEQ ID NO: 1837 - RNA, 21 nt, Artificial Sequence
  Description of Artificial Sequence: Synthetic oligonucleotide
ucuagucaugcugaaauugca

SEQ ID NO: 1838 - RNA, 21 nt, Artificial Sequence
  Description of Artificial Sequence: Synthetic oligonucleotide
caauuucagcaugacuagagg

SEQ ID NO: 1839 - RNA, 21 nt, Artificial Sequence
  Description of Artificial Sequence: Synthetic oligonucleotide
cuagucaugcugaaauugcag

SEQ ID NO: 1840 - RNA, 21 nt, Artificial Sequence
  Description of Artificial Sequence: Synthetic oligonucleotide
gcaauuucagcaugacuagag

SEQ ID NO: 1841 - RNA, 21 nt, Artificial Sequence
  Description of Artificial Sequence: Synthetic oligonucleotide
uagucaugcugaaauugcagc

SEQ ID NO: 1842 - RNA, 21 nt, Artificial Sequence
  Description of Artificial Sequence: Synthetic oligonucleotide
ugcaauuucagcaugacuaga

SEQ ID NO: 1843 - RNA, 21 nt, Artificial Sequence
  Description of Artificial Sequence: Synthetic oligonucleotide
agucaugcugaaauugcagcc

SEQ ID NO: 1844 - RNA, 21 nt, Artificial Sequence
  Description of Artificial Sequence: Synthetic oligonucleotide
cugcaauuucagcaugacuag

SEQ ID NO: 1845 - RNA, 21 nt, Artificial Sequence
  Description of Artificial Sequence: Synthetic oligonucleotide
gucaugcugaaauugcagccu

SEQ ID NO: 1846 - RNA, 21 nt, Artificial Sequence
  Description of Artificial Sequence: Synthetic oligonucleotide
gcugcaauuucagcaugacua

SEQ ID NO: 1847 - RNA, 21 nt, Artificial Sequence
  Description of Artificial Sequence: Synthetic oligonucleotide
ucaugcugaaauugcagccug

SEQ ID NO: 1848 - RNA, 21 nt, Artificial Sequence
  Description of Artificial Sequence: Synthetic oligonucleotide
ggcugcaauuucagcaugacu

SEQ ID NO: 1849 - RNA, 21 nt, Artificial Sequence
  Description of Artificial Sequence: Synthetic oligonucleotide
caugcugaaauugcagccuga

SEQ ID NO: 1850 - RNA, 21 nt, Artificial Sequence
  Description of Artificial Sequence: Synthetic oligonucleotide
aggcugcaauuucagcaugac

SEQ ID NO: 1851 - RNA, 21 nt, Artificial Sequence
  Description of Artificial Sequence: Synthetic oligonucleotide
augcugaaauugcagccugau

SEQ ID NO: 1852 - RNA, 21 nt, Artificial Sequence
  Description of Artificial Sequence: Synthetic oligonucleotide
caggcugcaauuucagcauga

SEQ ID NO: 1853 - RNA, 21 nt, Artificial Sequence
  Description of Artificial Sequence: Synthetic oligonucleotide
ugcugaaauugcagccugaug

SEQ ID NO: 1854 - RNA, 21 nt, Artificial Sequence
  Description of Artificial Sequence: Synthetic oligonucleotide
ucaggcugcaauuucagcaug

SEQ ID NO: 1855 - RNA, 21 nt, Artificial Sequence
  Description of Artificial Sequence: Synthetic oligonucleotide
gcugaaauugcagccugaugg

SEQ ID NO: 1856 - RNA, 21 nt, Artificial Sequence
  Description of Artificial Sequence: Synthetic oligonucleotide
aucaggcugcaauuucagcau

SEQ ID NO: 1857 - RNA, 21 nt, Artificial Sequence
  Description of Artificial Sequence: Synthetic oligonucleotide
cugaaauugcagccugauggg

SEQ ID NO: 1858 - RNA, 21 nt, Artificial Sequence
  Description of Artificial Sequence: Synthetic oligonucleotide
caucaggcugcaauuucagca

SEQ ID NO: 1859 - RNA, 21 nt, Artificial Sequence
  Description of Artificial Sequence: Synthetic oligonucleotide
ugaaauugcagccugauggga

SEQ ID NO: 1860 - RNA, 21 nt, Artificial Sequence
  Description of Artificial Sequence: Synthetic oligonucleotide
ccaucaggcugcaauuucagc

SEQ ID NO: 1861 - RNA, 21 nt, Artificial Sequence
  Description of Artificial Sequence: Synthetic oligonucleotide
gaaauugcagccugaugggaa

SEQ ID NO: 1862 - RNA, 21 nt, Artificial Sequence
  Description of Artificial Sequence: Synthetic oligonucleotide
cccaucaggcugcaauuucag

SEQ ID NO: 1863 - RNA, 21 nt, Artificial Sequence
  Description of Artificial Sequence: Synthetic oligonucleotide
aaauugcagccugaugggaaa

SEQ ID NO: 1864 - RNA, 21 nt, Artificial Sequence
  Description of Artificial Sequence: Synthetic oligonucleotide
ucccaucaggcugcaauuuca

SEQ ID NO: 1865 - RNA, 21 nt, Artificial Sequence
  Description of Artificial Sequence: Synthetic oligonucleotide
aauugcagccugaugggaaac

SEQ ID NO: 1866 - RNA, 21 nt, Artificial Sequence
  Description of Artificial Sequence: Synthetic oligonucleotide
uucccaucaggcugcaauuuc

SEQ ID NO: 1867 - RNA, 21 nt, Artificial Sequence
  Description of Artificial Sequence: Synthetic oligonucleotide
auugcagccugaugggaaacu

SEQ ID NO: 1868 - RNA, 21 nt, Artificial Sequence
  Description of Artificial Sequence: Synthetic oligonucleotide
uuucccaucaggcugcaauuu

SEQ ID NO: 1869 - RNA, 21 nt, Artificial Sequence
  Description of Artificial Sequence: Synthetic oligonucleotide
uugcagccugaugggaaacuc

SEQ ID NO: 1870 - RNA, 21 nt, Artificial Sequence
  Description of Artificial Sequence: Synthetic oligonucleotide
guuucccaucaggcugcaauu

SEQ ID NO: 1871 - RNA, 21 nt, Artificial Sequence
  Description of Artificial Sequence: Synthetic oligonucleotide
ugcagccugaugggaaacucu

SEQ ID NO: 1872 - RNA, 21 nt, Artificial Sequence
  Description of Artificial Sequence: Synthetic oligonucleotide
aguuucccaucaggcugcaau

SEQ ID NO: 1873 - RNA, 21 nt, Artificial Sequence
  Description of Artificial Sequence: Synthetic oligonucleotide
gcagccugaugggaaacucuu

SEQ ID NO: 1874 - RNA, 21 nt, Artificial Sequence
  Description of Artificial Sequence: Synthetic oligonucleotide
gaguuucccaucaggcugcaa

SEQ ID NO: 1875 - RNA, 21 nt, Artificial Sequence
  Description of Artificial Sequence: Synthetic oligonucleotide
cagccugaugggaaacucuug

SEQ ID NO: 1876 - RNA, 21 nt, Artificial Sequence
  Description of Artificial Sequence: Synthetic oligonucleotide
agaguuucccaucaggcugca

SEQ ID NO: 1877 - RNA, 21 nt, Artificial Sequence
  Description of Artificial Sequence: Synthetic oligonucleotide
agccugaugggaaacucuugc

SEQ ID NO: 1878 - RNA, 21 nt, Artificial Sequence
  Description of Artificial Sequence: Synthetic oligonucleotide
aagaguuucccaucaggcugc

SEQ ID NO: 1879 - RNA, 21 nt, Artificial Sequence
  Description of Artificial Sequence: Synthetic oligonucleotide
gccugaugggaaacucuugcc

SEQ ID NO: 1880 - RNA, 21 nt, Artificial Sequence
  Description of Artificial Sequence: Synthetic oligonucleotide
caagaguuucccaucaggcug

SEQ ID NO: 1881 - RNA, 21 nt, Artificial Sequence
  Description of Artificial Sequence: Synthetic oligonucleotide
ccugaugggaaacucuugccc

SEQ ID NO: 1882 - RNA, 21 nt, Artificial Sequence
  Description of Artificial Sequence: Synthetic oligonucleotide
gcaagaguuucccaucaggcu

SEQ ID NO: 1883 - RNA, 21 nt, Artificial Sequence
  Description of Artificial Sequence: Synthetic oligonucleotide
cugaugggaaacucuugccca

SEQ ID NO: 1884 - RNA, 21 nt, Artificial Sequence
  Description of Artificial Sequence: Synthetic oligonucleotide
ggcaagaguuucccaucaggc

SEQ ID NO: 1885 - RNA, 21 nt, Artificial Sequence
  Description of Artificial Sequence: Synthetic oligonucleotide
ugaugggaaacucuugcccau

SEQ ID NO: 1886 - RNA, 21 nt, Artificial Sequence
  Description of Artificial Sequence: Synthetic oligonucleotide
gggcaagaguuucccaucagg

SEQ ID NO: 1887 - RNA, 21 nt, Artificial Sequence
  Description of Artificial Sequence: Synthetic oligonucleotide
gaugggaaacucuugcccaug

SEQ ID NO: 1888 - RNA, 21 nt, Artificial Sequence
  Description of Artificial Sequence: Synthetic oligonucleotide
ugggcaagaguuucccaucag

SEQ ID NO: 1889 - RNA, 21 nt, Artificial Sequence
  Description of Artificial Sequence: Synthetic oligonucleotide
augggaaacucuugcccaugg

SEQ ID NO: 1890 - RNA, 21 nt, Artificial Sequence
  Description of Artificial Sequence: Synthetic oligonucleotide
augggcaagaguuucccauca

SEQ ID NO: 1891 - RNA, 21 nt, Artificial Sequence
  Description of Artificial Sequence: Synthetic oligonucleotide
ugggaaacucuugcccauggu

SEQ ID NO: 1892 - RNA, 21 nt, Artificial Sequence
  Description of Artificial Sequence: Synthetic oligonucleotide
caugggcaagaguuucccauc

SEQ ID NO: 1893 - RNA, 21 nt, Artificial Sequence
  Description of Artificial Sequence: Synthetic oligonucleotide
gggaaacucuugcccaugguc

SEQ ID NO: 1894 - RNA, 21 nt, Artificial Sequence
  Description of Artificial Sequence: Synthetic oligonucleotide
ccaugggcaagaguuucccau

SEQ ID NO: 1895 - RNA, 21 nt, Artificial Sequence
  Description of Artificial Sequence: Synthetic oligonucleotide
ggaaacucuugcccaugguca

SEQ ID NO: 1896 - RNA, 21 nt, Artificial Sequence
  Description of Artificial Sequence: Synthetic oligonucleotide
accaugggcaagaguuuccca

SEQ ID NO: 1897 - RNA, 21 nt, Artificial Sequence
  Description of Artificial Sequence: Synthetic oligonucleotide
gaaacucuugcccauggucau

SEQ ID NO: 1898 - RNA, 21 nt, Artificial Sequence
  Description of Artificial Sequence: Synthetic oligonucleotide
gaccaugggcaagaguuuccc

SEQ ID NO: 1899 - RNA, 21 nt, Artificial Sequence
  Description of Artificial Sequence: Synthetic oligonucleotide
aaacucuugcccauggucauc

SEQ ID NO: 1900 - RNA, 21 nt, Artificial Sequence
  Description of Artificial Sequence: Synthetic oligonucleotide
ugaccaugggcaagaguuucc

SEQ ID NO: 1901 - RNA, 21 nt, Artificial Sequence
  Description of Artificial Sequence: Synthetic oligonucleotide
aacucuugcccauggucaucc

SEQ ID NO: 1902 - RNA, 21 nt, Artificial Sequence
  Description of Artificial Sequence: Synthetic oligonucleotide
augaccaugggcaagaguuuc

SEQ ID NO: 1903 - RNA, 21 nt, Artificial Sequence
  Description of Artificial Sequence: Synthetic oligonucleotide
acucuugcccauggucaucca

SEQ ID NO: 1904 - RNA, 21 nt, Artificial Sequence
  Description of Artificial Sequence: Synthetic oligonucleotide
gaugaccaugggcaagaguuu

SEQ ID NO: 1905 - RNA, 21 nt, Artificial Sequence
  Description of Artificial Sequence: Synthetic oligonucleotide
cucuugcccauggucauccag

SEQ ID NO: 1906 - RNA, 21 nt, Artificial Sequence
  Description of Artificial Sequence: Synthetic oligonucleotide
ggaugaccaugggcaagaguu

SEQ ID NO: 1907 - RNA, 21 nt, Artificial Sequence
  Description of Artificial Sequence: Synthetic oligonucleotide
ucuugcccauggucauccagc

SEQ ID NO: 1908 - RNA, 21 nt, Artificial Sequence
  Description of Artificial Sequence: Synthetic oligonucleotide
uggaugaccaugggcaagagu

SEQ ID NO: 1909 - RNA, 21 nt, Artificial Sequence
  Description of Artificial Sequence: Synthetic oligonucleotide
cuugcccauggucauccagcu

SEQ ID NO: 1910 - RNA, 21 nt, Artificial Sequence
  Description of Artificial Sequence: Synthetic oligonucleotide
cuggaugaccaugggcaagag

SEQ ID NO: 1911 - RNA, 21 nt, Artificial Sequence
  Description of Artificial Sequence: Synthetic oligonucleotide
uugcccauggucauccagcuc

SEQ ID NO: 1912 - RNA, 21 nt, Artificial Sequence
  Description of Artificial Sequence: Synthetic oligonucleotide
gcuggaugaccaugggcaaga

SEQ ID NO: 1913 - RNA, 21 nt, Artificial Sequence
  Description of Artificial Sequence: Synthetic oligonucleotide
ugcccauggucauccagcucc

SEQ ID NO: 1914 - RNA, 21 nt, Artificial Sequence
  Description of Artificial Sequence: Synthetic oligonucleotide
agcuggaugaccaugggcaag

SEQ ID NO: 1915 - RNA, 21 nt, Artificial Sequence
  Description of Artificial Sequence: Synthetic oligonucleotide
gcccauggucauccagcucca

SEQ ID NO: 1916 - RNA, 21 nt, Artificial Sequence
  Description of Artificial Sequence: Synthetic oligonucleotide
gagcuggaugaccaugggcaa

SEQ ID NO: 1917 - RNA, 21 nt, Artificial Sequence
  Description of Artificial Sequence: Synthetic oligonucleotide
cccauggucauccagcuccag

SEQ ID NO: 1918 - RNA, 21 nt, Artificial Sequence
  Description of Artificial Sequence: Synthetic oligonucleotide
ggagcuggaugaccaugggca

SEQ ID NO: 1919 - RNA, 21 nt, Artificial Sequence
  Description of Artificial Sequence: Synthetic oligonucleotide
ccauggucauccagcuccagc

SEQ ID NO: 1920 - RNA, 21 nt, Artificial Sequence
  Description of Artificial Sequence: Synthetic oligonucleotide
uggagcuggaugaccaugggc

SEQ ID NO: 1921 - RNA, 21 nt, Artificial Sequence
  Description of Artificial Sequence: Synthetic oligonucleotide
cauggucauccagcuccagcu

SEQ ID NO: 1922 - RNA, 21 nt, Artificial Sequence
  Description of Artificial Sequence: Synthetic oligonucleotide
cuggagcuggaugaccauggg

SEQ ID NO: 1923 - RNA, 21 nt, Artificial Sequence
  Description of Artificial Sequence: Synthetic oligonucleotide
auggucauccagcuccagcug

SEQ ID NO: 1924 - RNA, 21 nt, Artificial Sequence
  Description of Artificial Sequence: Synthetic oligonucleotide
gcuggagcuggaugaccaugg

SEQ ID NO: 1925 - RNA, 21 nt, Artificial Sequence
  Description of Artificial Sequence: Synthetic oligonucleotide
uggucauccagcuccagcugc

SEQ ID NO: 1926 - RNA, 21 nt, Artificial Sequence
  Description of Artificial Sequence: Synthetic oligonucleotide
agcuggagcuggaugaccaug

SEQ ID NO: 1927 - RNA, 21 nt, Artificial Sequence
  Description of Artificial Sequence: Synthetic oligonucleotide
ggucauccagcuccagcugcc

SEQ ID NO: 1928 - RNA, 21 nt, Artificial Sequence
  Description of Artificial Sequence: Synthetic oligonucleotide
cagcuggagcuggaugaccau

SEQ ID NO: 1929 - RNA, 21 nt, Artificial Sequence
  Description of Artificial Sequence: Synthetic oligonucleotide
gucauccagcuccagcugccc

SEQ ID NO: 1930 - RNA, 21 nt, Artificial Sequence
  Description of Artificial Sequence: Synthetic oligonucleotide
gcagcuggagcuggaugacca

SEQ ID NO: 1931 - RNA, 21 nt, Artificial Sequence
  Description of Artificial Sequence: Synthetic oligonucleotide
ucauccagcuccagcugcccc

SEQ ID NO: 1932 - RNA, 21 nt, Artificial Sequence
  Description of Artificial Sequence: Synthetic oligonucleotide
ggcagcuggagcuggaugacc

SEQ ID NO: 1933 - RNA, 21 nt, Artificial Sequence
  Description of Artificial Sequence: Synthetic oligonucleotide
cauccagcuccagcugccccg

SEQ ID NO: 1934 - RNA, 21 nt, Artificial Sequence
  Description of Artificial Sequence: Synthetic oligonucleotide
gggcagcuggagcuggaugac

SEQ ID NO: 1935 - RNA, 21 nt, Artificial Sequence
  Description of Artificial Sequence: Synthetic oligonucleotide
auccagcuccagcugccccgc

SEQ ID NO: 1936 - RNA, 21 nt, Artificial Sequence
  Description of Artificial Sequence: Synthetic oligonucleotide
ggggcagcuggagcuggauga

SEQ ID NO: 1937 - RNA, 21 nt, Artificial Sequence
  Description of Artificial Sequence: Synthetic oligonucleotide
uccagcuccagcugccccgca

SEQ ID NO: 1938 - RNA, 21 nt, Artificial Sequence
  Description of Artificial Sequence: Synthetic oligonucleotide
cggggcagcuggagcuggaug

SEQ ID NO: 1939 - RNA, 21 nt, Artificial Sequence
  Description of Artificial Sequence: Synthetic oligonucleotide
ccagcuccagcugccccgcac

SEQ ID NO: 1940 - RNA, 21 nt, Artificial Sequence
  Description of Artificial Sequence: Synthetic oligonucleotide
gcggggcagcuggagcuggau

SEQ ID NO: 1941 - RNA, 21 nt, Artificial Sequence
  Description of Artificial Sequence: Synthetic oligonucleotide
cagcuccagcugccccgcaca

SEQ ID NO: 1942 - RNA, 21 nt, Artificial Sequence
  Description of Artificial Sequence: Synthetic oligonucleotide
ugcggggcagcuggagcugga

SEQ ID NO: 1943 - RNA, 21 nt, Artificial Sequence
  Description of Artificial Sequence: Synthetic oligonucleotide
agcuccagcugccccgcacag

SEQ ID NO: 1944 - RNA, 21 nt, Artificial Sequence
  Description of Artificial Sequence: Synthetic oligonucleotide
gugcggggcagcuggagcugg

SEQ ID NO: 1945 - RNA, 21 nt, Artificial Sequence
  Description of Artificial Sequence: Synthetic oligonucleotide
gcuccagcugccccgcacagg

SEQ ID NO: 1946 - RNA, 21 nt, Artificial Sequence
  Description of Artificial Sequence: Synthetic oligonucleotide
ugugcggggcagcuggagcug

SEQ ID NO: 1947 - RNA, 21 nt, Artificial Sequence
  Description of Artificial Sequence: Synthetic oligonucleotide
cuccagcugccccgcacagga

SEQ ID NO: 1948 - RNA, 21 nt, Artificial Sequence
  Description of Artificial Sequence: Synthetic oligonucleotide
cugugcggggcagcuggagcu

SEQ ID NO: 1949 - RNA, 21 nt, Artificial Sequence
  Description of Artificial Sequence: Synthetic oligonucleotide
uccagcugccccgcacaggau

SEQ ID NO: 1950 - RNA, 21 nt, Artificial Sequence
  Description of Artificial Sequence: Synthetic oligonucleotide
ccugugcggggcagcuggagc

SEQ ID NO: 1951 - RNA, 21 nt, Artificial Sequence
  Description of Artificial Sequence: Synthetic oligonucleotide
ccagcugccccgcacaggauc

SEQ ID NO: 1952 - RNA, 21 nt, Artificial Sequence
  Description of Artificial Sequence: Synthetic oligonucleotide
uccugugcggggcagcuggag

SEQ ID NO: 1953 - RNA, 21 nt, Artificial Sequence
  Description of Artificial Sequence: Synthetic oligonucleotide
cagcugccccgcacaggaucc

SEQ ID NO: 1954 - RNA, 21 nt, Artificial Sequence
  Description of Artificial Sequence: Synthetic oligonucleotide
auccugugcggggcagcugga

SEQ ID NO: 1955 - RNA, 21 nt, Artificial Sequence
  Description of Artificial Sequence: Synthetic oligonucleotide
agcugccccgcacaggauccc

SEQ ID NO: 1956 - RNA, 21 nt, Artificial Sequence
  Description of Artificial Sequence: Synthetic oligonucleotide
gauccugugcggggcagcugg

SEQ ID NO: 1957 - RNA, 21 nt, Artificial Sequence
  Description of Artificial Sequence: Synthetic oligonucleotide
gcugccccgcacaggaucccc

SEQ ID NO: 1958 - RNA, 21 nt, Artificial Sequence
  Description of Artificial Sequence: Synthetic oligonucleotide
ggauccugugcggggcagcug

SEQ ID NO: 1959 - RNA, 21 nt, Artificial Sequence
  Description of Artificial Sequence: Synthetic oligonucleotide
cugccccgcacaggaucccca

SEQ ID NO: 1960 - RNA, 21 nt, Artificial Sequence
  Description of Artificial Sequence: Synthetic oligonucleotide
gggauccugugcggggcagcu

SEQ ID NO: 1961 - RNA, 21 nt, Artificial Sequence
  Description of Artificial Sequence: Synthetic oligonucleotide
ugccccgcacaggauccccac

SEQ ID NO: 1962 - RNA, 21 nt, Artificial Sequence
  Description of Artificial Sequence: Synthetic oligonucleotide
ggggauccugugcggggcagc

SEQ ID NO: 1963 - RNA, 21 nt, Artificial Sequence
  Description of Artificial Sequence: Synthetic oligonucleotide
gccccgcacaggauccccacc

SEQ ID NO: 1964 - RNA, 21 nt, Artificial Sequence
  Description of Artificial Sequence: Synthetic oligonucleotide
uggggauccugugcggggcag

SEQ ID NO: 1965 - RNA, 21 nt, Artificial Sequence
  Description of Artificial Sequence: Synthetic oligonucleotide
ccccgcacaggauccccacca

SEQ ID NO: 1966 - RNA, 21 nt, Artificial Sequence
  Description of Artificial Sequence: Synthetic oligonucleotide
guggggauccugugcggggca

SEQ ID NO: 1967 - RNA, 21 nt, Artificial Sequence
  Description of Artificial Sequence: Synthetic oligonucleotide
cccgcacaggauccccaccac

SEQ ID NO: 1968 - RNA, 21 nt, Artificial Sequence
  Description of Artificial Sequence: Synthetic oligonucleotide
gguggggauccugugcggggc

SEQ ID NO: 1969 - RNA, 21 nt, Artificial Sequence
  Description of Artificial Sequence: Synthetic oligonucleotide
ccgcacaggauccccaccacc

SEQ ID NO: 1970 - RNA, 21 nt, Artificial Sequence
  Description of Artificial Sequence: Synthetic oligonucleotide
ugguggggauccugugcgggg

SEQ ID NO: 1971 - RNA, 21 nt, Artificial Sequence
  Description of Artificial Sequence: Synthetic oligonucleotide
cgcacaggauccccaccaccu

SEQ ID NO: 1972 - RNA, 21 nt, Artificial Sequence
  Description of Artificial Sequence: Synthetic oligonucleotide
gugguggggauccugugcggg

SEQ ID NO: 1973 - RNA, 21 nt, Artificial Sequence
  Description of Artificial Sequence: Synthetic oligonucleotide
gcacaggauccccaccaccuc

SEQ ID NO: 1974 - RNA, 21 nt, Artificial Sequence
  Description of Artificial Sequence: Synthetic oligonucleotide
ggugguggggauccugugcgg

SEQ ID NO: 1975 - RNA, 21 nt, Artificial Sequence
  Description of Artificial Sequence: Synthetic oligonucleotide
cacaggauccccaccaccucc

SEQ ID NO: 1976 - RNA, 21 nt, Artificial Sequence
  Description of Artificial Sequence: Synthetic oligonucleotide
aggugguggggauccugugcg

SEQ ID NO: 1977 - RNA, 21 nt, Artificial Sequence
  Description of Artificial Sequence: Synthetic oligonucleotide
acaggauccccaccaccuccc

SEQ ID NO: 1978 - RNA, 21 nt, Artificial Sequence
  Description of Artificial Sequence: Synthetic oligonucleotide
gaggugguggggauccugugc

SEQ ID NO: 1979 - RNA, 21 nt, Artificial Sequence
  Description of Artificial Sequence: Synthetic oligonucleotide
caggauccccaccaccucccc

SEQ ID NO: 1980 - RNA, 21 nt, Artificial Sequence
  Description of Artificial Sequence: Synthetic oligonucleotide
ggaggugguggggauccugug

SEQ ID NO: 1981 - RNA, 21 nt, Artificial Sequence
  Description of Artificial Sequence: Synthetic oligonucleotide
aggauccccaccaccuccccu

SEQ ID NO: 1982 - RNA, 21 nt, Artificial Sequence
  Description of Artificial Sequence: Synthetic oligonucleotide
gggaggugguggggauccugu

SEQ ID NO: 1983 - RNA, 21 nt, Artificial Sequence
  Description of Artificial Sequence: Synthetic oligonucleotide
ggauccccaccaccuccccuu

SEQ ID NO: 1984 - RNA, 21 nt, Artificial Sequence
  Description of Artificial Sequence: Synthetic oligonucleotide
ggggaggugguggggauccug

SEQ ID NO: 1985 - RNA, 21 nt, Artificial Sequence
  Description of Artificial Sequence: Synthetic oligonucleotide
gauccccaccaccuccccuuu

SEQ ID NO: 1986 - RNA, 21 nt, Artificial Sequence
  Description of Artificial Sequence: Synthetic oligonucleotide
aggggaggugguggggauccu

SEQ ID NO: 1987 - RNA, 21 nt, Artificial Sequence
  Description of Artificial Sequence: Synthetic oligonucleotide
auccccaccaccuccccuuuu

SEQ ID NO: 1988 - RNA, 21 nt, Artificial Sequence
  Description of Artificial Sequence: Synthetic oligonucleotide
aaggggaggugguggggaucc

SEQ ID NO: 1989 - RNA, 21 nt, Artificial Sequence
  Description of Artificial Sequence: Synthetic oligonucleotide
uccccaccaccuccccuuuuc

SEQ ID NO: 1990 - RNA, 21 nt, Artificial Sequence
  Description of Artificial Sequence: Synthetic oligonucleotide
aaaggggaggugguggggauc

SEQ ID NO: 1991 - RNA, 21 nt, Artificial Sequence
  Description of Artificial Sequence: Synthetic oligonucleotide
ccccaccaccuccccuuuucu

SEQ ID NO: 1992 - RNA, 21 nt, Artificial Sequence
  Description of Artificial Sequence: Synthetic oligonucleotide
aaaaggggaggugguggggau

SEQ ID NO: 1993 - RNA, 21 nt, Artificial Sequence
  Description of Artificial Sequence: Synthetic oligonucleotide
cccaccaccuccccuuuucuu

SEQ ID NO: 1994 - RNA, 21 nt, Artificial Sequence
  Description of Artificial Sequence: Synthetic oligonucleotide
gaaaaggggagguggugggga

SEQ ID NO: 1995 - RNA, 21 nt, Artificial Sequence
  Description of Artificial Sequence: Synthetic oligonucleotide
ccaccaccuccccuuuucuug

SEQ ID NO: 1996 - RNA, 21 nt, Artificial Sequence
  Description of Artificial Sequence: Synthetic oligonucleotide
agaaaaggggagguggugggg

SEQ ID NO: 1997 - RNA, 21 nt, Artificial Sequence
  Description of Artificial Sequence: Synthetic oligonucleotide
caccaccuccccuuuucuugc

SEQ ID NO: 1998 - RNA, 21 nt, Artificial Sequence
  Description of Artificial Sequence: Synthetic oligonucleotide
aagaaaaggggaggugguggg

SEQ ID NO: 1999 - RNA, 21 nt, Artificial Sequence
  Description of Artificial Sequence: Synthetic oligonucleotide
accaccuccccuuuucuugcc

SEQ ID NO: 2000 - RNA, 21 nt, Artificial Sequence
  Description of Artificial Sequence: Synthetic oligonucleotide
caagaaaaggggagguggugg

SEQ ID NO: 2001 - RNA, 21 nt, Artificial Sequence
  Description of Artificial Sequence: Synthetic oligonucleotide
ccaccuccccuuuucuugccu

SEQ ID NO: 2002 - RNA, 21 nt, Artificial Sequence
  Description of Artificial Sequence: Synthetic oligonucleotide
gcaagaaaaggggagguggug

SEQ ID NO: 2003 - RNA, 21 nt, Artificial Sequence
  Description of Artificial Sequence: Synthetic oligonucleotide
caccuccccuuuucuugccua

SEQ ID NO: 2004 - RNA, 21 nt, Artificial Sequence
  Description of Artificial Sequence: Synthetic oligonucleotide
ggcaagaaaaggggagguggu

SEQ ID NO: 2005 - RNA, 21 nt, Artificial Sequence
  Description of Artificial Sequence: Synthetic oligonucleotide
accuccccuuuucuugccuac

SEQ ID NO: 2006 - RNA, 21 nt, Artificial Sequence
  Description of Artificial Sequence: Synthetic oligonucleotide
aggcaagaaaaggggaggugg

SEQ ID NO: 2007 - RNA, 21 nt, Artificial Sequence
  Description of Artificial Sequence: Synthetic oligonucleotide
ccuccccuuuucuugccuacg

SEQ ID NO: 2008 - RNA, 21 nt, Artificial Sequence
  Description of Artificial Sequence: Synthetic oligonucleotide
uaggcaagaaaaggggaggug

SEQ ID NO: 2009 - RNA, 21 nt, Artificial Sequence
  Description of Artificial Sequence: Synthetic oligonucleotide
cuccccuuuucuugccuacgg

SEQ ID NO: 2010 - RNA, 21 nt, Artificial Sequence
  Description of Artificial Sequence: Synthetic oligonucleotide
guaggcaagaaaaggggaggu

SEQ ID NO: 2011 - RNA, 21 nt, Artificial Sequence
  Description of Artificial Sequence: Synthetic oligonucleotide
uccccuuuucuugccuacgga

SEQ ID NO: 2012 - RNA, 21 nt, Artificial Sequence
  Description of Artificial Sequence: Synthetic oligonucleotide
cguaggcaagaaaaggggagg

SEQ ID NO: 2013 - RNA, 21 nt, Artificial Sequence
  Description of Artificial Sequence: Synthetic oligonucleotide
ccccuuuucuugccuacggau

SEQ ID NO: 2014 - RNA, 21 nt, Artificial Sequence
  Description of Artificial Sequence: Synthetic oligonucleotide
ccguaggcaagaaaaggggag

SEQ ID NO: 2015 - RNA, 21 nt, Artificial Sequence
  Description of Artificial Sequence: Synthetic oligonucleotide
cccuuuucuugccuacggauc

SEQ ID NO: 2016 - RNA, 21 nt, Artificial Sequence
  Description of Artificial Sequence: Synthetic oligonucleotide
uccguaggcaagaaaagggga

SEQ ID NO: 2017 - RNA, 21 nt, Artificial Sequence
  Description of Artificial Sequence: Synthetic oligonucleotide
ccuuuucuugccuacggaucc

SEQ ID NO: 2018 - RNA, 21 nt, Artificial Sequence
  Description of Artificial Sequence: Synthetic oligonucleotide
auccguaggcaagaaaagggg

SEQ ID NO: 2019 - RNA, 21 nt, Artificial Sequence
  Description of Artificial Sequence: Synthetic oligonucleotide
cuuuucuugccuacggauccc

SEQ ID NO: 2020 - RNA, 21 nt, Artificial Sequence
  Description of Artificial Sequence: Synthetic oligonucleotide
gauccguaggcaagaaaaggg

SEQ ID NO: 2021 - RNA, 21 nt, Artificial Sequence
  Description of Artificial Sequence: Synthetic oligonucleotide
uuuucuugccuacggaucccc

SEQ ID NO: 2022 - RNA, 21 nt, Artificial Sequence
  Description of Artificial Sequence: Synthetic oligonucleotide
ggauccguaggcaagaaaagg

SEQ ID NO: 2023 - RNA, 21 nt, Artificial Sequence
  Description of Artificial Sequence: Synthetic oligonucleotide
uuucuugccuacggauccccc

SEQ ID NO: 2024 - RNA, 21 nt, Artificial Sequence
  Description of Artificial Sequence: Synthetic oligonucleotide
gggauccguaggcaagaaaag

SEQ ID NO: 2025 - RNA, 21 nt, Artificial Sequence
  Description of Artificial Sequence: Synthetic oligonucleotide
uucuugccuacggauccccca

SEQ ID NO: 2026 - RNA, 21 nt, Artificial Sequence
  Description of Artificial Sequence: Synthetic oligonucleotide
ggggauccguaggcaagaaaa

SEQ ID NO: 2027 - RNA, 21 nt, Artificial Sequence
  Description of Artificial Sequence: Synthetic oligonucleotide
ucuugccuacggaucccccaa

SEQ ID NO: 2028 - RNA, 21 nt, Artificial Sequence
  Description of Artificial Sequence: Synthetic oligonucleotide
gggggauccguaggcaagaaa

SEQ ID NO: 2029 - RNA, 21 nt, Artificial Sequence
  Description of Artificial Sequence: Synthetic oligonucleotide
cuugccuacggaucccccaau

SEQ ID NO: 2030 - RNA, 21 nt, Artificial Sequence
  Description of Artificial Sequence: Synthetic oligonucleotide
ugggggauccguaggcaagaa

SEQ ID NO: 2031 - RNA, 21 nt, Artificial Sequence
  Description of Artificial Sequence: Synthetic oligonucleotide
uugccuacggaucccccaaug

SEQ ID NO: 2032 - RNA, 21 nt, Artificial Sequence
  Description of Artificial Sequence: Synthetic oligonucleotide
uugggggauccguaggcaaga

SEQ ID NO: 2033 - RNA, 21 nt, Artificial Sequence
  Description of Artificial Sequence: Synthetic oligonucleotide
ugccuacggaucccccaaugg

SEQ ID NO: 2034 - RNA, 21 nt, Artificial Sequence
  Description of Artificial Sequence: Synthetic oligonucleotide
auugggggauccguaggcaag

SEQ ID NO: 2035 - RNA, 21 nt, Artificial Sequence
  Description of Artificial Sequence: Synthetic oligonucleotide
gccuacggaucccccaauggc

SEQ ID NO: 2036 - RNA, 21 nt, Artificial Sequence
  Description of Artificial Sequence: Synthetic oligonucleotide
cauugggggauccguaggcaa

SEQ ID NO: 2037 - RNA, 21 nt, Artificial Sequence
  Description of Artificial Sequence: Synthetic oligonucleotide
ccuacggaucccccaauggcc

SEQ ID NO: 2038 - RNA, 21 nt, Artificial Sequence
  Description of Artificial Sequence: Synthetic oligonucleotide
ccauugggggauccguaggca

SEQ ID NO: 2039 - RNA, 21 nt, Artificial Sequence
  Description of Artificial Sequence: Synthetic oligonucleotide
cuacggaucccccaauggccu

SEQ ID NO: 2040 - RNA, 21 nt, Artificial Sequence
  Description of Artificial Sequence: Synthetic oligonucleotide
gccauugggggauccguaggc

SEQ ID NO: 2041 - RNA, 21 nt, Artificial Sequence
  Description of Artificial Sequence: Synthetic oligonucleotide
uacggaucccccaauggccug

SEQ ID NO: 2042 - RNA, 21 nt, Artificial Sequence
  Description of Artificial Sequence: Synthetic oligonucleotide
ggccauugggggauccguagg

SEQ ID NO: 2043 - RNA, 21 nt, Artificial Sequence
  Description of Artificial Sequence: Synthetic oligonucleotide
acggaucccccaauggccugg

SEQ ID NO: 2044 - RNA, 21 nt, Artificial Sequence
  Description of Artificial Sequence: Synthetic oligonucleotide
aggccauugggggauccguag

SEQ ID NO: 2045 - RNA, 21 nt, Artificial Sequence
  Description of Artificial Sequence: Synthetic oligonucleotide
cggaucccccaauggccuggc

SEQ ID NO: 2046 - RNA, 21 nt, Artificial Sequence
  Description of Artificial Sequence: Synthetic oligonucleotide
caggccauugggggauccgua

SEQ ID NO: 2047 - RNA, 21 nt, Artificial Sequence
  Description of Artificial Sequence: Synthetic oligonucleotide
ggaucccccaauggccuggcu

SEQ ID NO: 2048 - RNA, 21 nt, Artificial Sequence
  Description of Artificial Sequence: Synthetic oligonucleotide
ccaggccauugggggauccgu

SEQ ID NO: 2049 - RNA, 21 nt, Artificial Sequence
  Description of Artificial Sequence: Synthetic oligonucleotide
gaucccccaauggccuggcuu

SEQ ID NO: 2050 - RNA, 21 nt, Artificial Sequence
  Description of Artificial Sequence: Synthetic oligonucleotide
gccaggccauugggggauccg

SEQ ID NO: 2051 - RNA, 21 nt, Artificial Sequence
  Description of Artificial Sequence: Synthetic oligonucleotide
aucccccaauggccuggcuuc

SEQ ID NO: 2052 - RNA, 21 nt, Artificial Sequence
  Description of Artificial Sequence: Synthetic oligonucleotide
agccaggccauugggggaucc

SEQ ID NO: 2053 - RNA, 21 nt, Artificial Sequence
  Description of Artificial Sequence: Synthetic oligonucleotide
ucccccaauggccuggcuucu

SEQ ID NO: 2054 - RNA, 21 nt, Artificial Sequence
  Description of Artificial Sequence: Synthetic oligonucleotide
aagccaggccauugggggauc

SEQ ID NO: 2055 - RNA, 21 nt, Artificial Sequence
  Description of Artificial Sequence: Synthetic oligonucleotide
cccccaauggccuggcuucug

SEQ ID NO: 2056 - RNA, 21 nt, Artificial Sequence
  Description of Artificial Sequence: Synthetic oligonucleotide
gaagccaggccauugggggau

SEQ ID NO: 2057 - RNA, 21 nt, Artificial Sequence
  Description of Artificial Sequence: Synthetic oligonucleotide
ccccaauggccuggcuucugg

SEQ ID NO: 2058 - RNA, 21 nt, Artificial Sequence
  Description of Artificial Sequence: Synthetic oligonucleotide
agaagccaggccauuggggga

SEQ ID NO: 2059 - RNA, 21 nt, Artificial Sequence
  Description of Artificial Sequence: Synthetic oligonucleotide
cccaauggccuggcuucuggc

SEQ ID NO: 2060 - RNA, 21 nt, Artificial Sequence
  Description of Artificial Sequence: Synthetic oligonucleotide
cagaagccaggccauuggggg

SEQ ID NO: 2061 - RNA, 21 nt, Artificial Sequence
  Description of Artificial Sequence: Synthetic oligonucleotide
ccaauggccuggcuucuggcc

SEQ ID NO: 2062 - RNA, 21 nt, Artificial Sequence
  Description of Artificial Sequence: Synthetic oligonucleotide
ccagaagccaggccauugggg

SEQ ID NO: 2063 - RNA, 21 nt, Artificial Sequence
  Description of Artificial Sequence: Synthetic oligonucleotide
caauggccuggcuucuggcca

SEQ ID NO: 2064 - RNA, 21 nt, Artificial Sequence
  Description of Artificial Sequence: Synthetic oligonucleotide
gccagaagccaggccauuggg

SEQ ID NO: 2065 - RNA, 21 nt, Artificial Sequence
  Description of Artificial Sequence: Synthetic oligonucleotide
aauggccuggcuucuggccaa

SEQ ID NO: 2066 - RNA, 21 nt, Artificial Sequence
  Description of Artificial Sequence: Synthetic oligonucleotide
ggccagaagccaggccauugg

SEQ ID NO: 2067 - RNA, 21 nt, Artificial Sequence
  Description of Artificial Sequence: Synthetic oligonucleotide
auggccuggcuucuggccaaa

SEQ ID NO: 2068 - RNA, 21 nt, Artificial Sequence
  Description of Artificial Sequence: Synthetic oligonucleotide
uggccagaagccaggccauug

SEQ ID NO: 2069 - RNA, 21 nt, Artificial Sequence
  Description of Artificial Sequence: Synthetic oligonucleotide
uggccuggcuucuggccaaau

SEQ ID NO: 2070 - RNA, 21 nt, Artificial Sequence
  Description of Artificial Sequence: Synthetic oligonucleotide
uuggccagaagccaggccauu

SEQ ID NO: 2071 - RNA, 21 nt, Artificial Sequence
  Description of Artificial Sequence: Synthetic oligonucleotide
ggccuggcuucuggccaaaug

SEQ ID NO: 2072 - RNA, 21 nt, Artificial Sequence
  Description of Artificial Sequence: Synthetic oligonucleotide
uuuggccagaagccaggccau

SEQ ID NO: 2073 - RNA, 21 nt, Artificial Sequence
  Description of Artificial Sequence: Synthetic oligonucleotide
gccuggcuucuggccaaaugc

SEQ ID NO: 2074 - RNA, 21 nt, Artificial Sequence
  Description of Artificial Sequence: Synthetic oligonucleotide
auuuggccagaagccaggcca

SEQ ID NO: 2075 - RNA, 21 nt, Artificial Sequence
  Description of Artificial Sequence: Synthetic oligonucleotide
ccuggcuucuggccaaaugcu

SEQ ID NO: 2076 - RNA, 21 nt, Artificial Sequence
  Description of Artificial Sequence: Synthetic oligonucleotide
cauuuggccagaagccaggcc

SEQ ID NO: 2077 - RNA, 21 nt, Artificial Sequence
  Description of Artificial Sequence: Synthetic oligonucleotide
cuggcuucuggccaaaugcug

SEQ ID NO: 2078 - RNA, 21 nt, Artificial Sequence
  Description of Artificial Sequence: Synthetic oligonucleotide
gcauuuggccagaagccaggc

SEQ ID NO: 2079 - RNA, 21 nt, Artificial Sequence
  Description of Artificial Sequence: Synthetic oligonucleotide
uggcuucuggccaaaugcugg

SEQ ID NO: 2080 - RNA, 21 nt, Artificial Sequence
  Description of Artificial Sequence: Synthetic oligonucleotide
agcauuuggccagaagccagg

SEQ ID NO: 2081 - RNA, 21 nt, Artificial Sequence
  Description of Artificial Sequence: Synthetic oligonucleotide
ggcuucuggccaaaugcuggg

SEQ ID NO: 2082 - RNA, 21 nt, Artificial Sequence
  Description of Artificial Sequence: Synthetic oligonucleotide
cagcauuuggccagaagccag

SEQ ID NO: 2083 - RNA, 21 nt, Artificial Sequence
  Description of Artificial Sequence: Synthetic oligonucleotide
gcuucuggccaaaugcugggu

SEQ ID NO: 2084 - RNA, 21 nt, Artificial Sequence
  Description of Artificial Sequence: Synthetic oligonucleotide
ccagcauuuggccagaagcca

SEQ ID NO: 2085 - RNA, 21 nt, Artificial Sequence
  Description of Artificial Sequence: Synthetic oligonucleotide
cuucuggccaaaugcugggug

SEQ ID NO: 2086 - RNA, 21 nt, Artificial Sequence
  Description of Artificial Sequence: Synthetic oligonucleotide
cccagcauuuggccagaagcc

SEQ ID NO: 2087 - RNA, 21 nt, Artificial Sequence
  Description of Artificial Sequence: Synthetic oligonucleotide
uucuggccaaaugcugggugc

SEQ ID NO: 2088 - RNA, 21 nt, Artificial Sequence
  Description of Artificial Sequence: Synthetic oligonucleotide
acccagcauuuggccagaagc

SEQ ID NO: 2089 - RNA, 21 nt, Artificial Sequence
  Description of Artificial Sequence: Synthetic oligonucleotide
ucuggccaaaugcugggugcg

SEQ ID NO: 2090 - RNA, 21 nt, Artificial Sequence
  Description of Artificial Sequence: Synthetic oligonucleotide
cacccagcauuuggccagaag

SEQ ID NO: 2091 - RNA, 21 nt, Artificial Sequence
  Description of Artificial Sequence: Synthetic oligonucleotide
cuggccaaaugcugggugcgc

SEQ ID NO: 2092 - RNA, 21 nt, Artificial Sequence
  Description of Artificial Sequence: Synthetic oligonucleotide
gcacccagcauuuggccagaa

SEQ ID NO: 2093 - RNA, 21 nt, Artificial Sequence
  Description of Artificial Sequence: Synthetic oligonucleotide
uggccaaaugcugggugcgca

SEQ ID NO: 2094 - RNA, 21 nt, Artificial Sequence
  Description of Artificial Sequence: Synthetic oligonucleotide
cgcacccagcauuuggccaga

SEQ ID NO: 2095 - RNA, 21 nt, Artificial Sequence
  Description of Artificial Sequence: Synthetic oligonucleotide
ggccaaaugcugggugcgcag

SEQ ID NO: 2096 - RNA, 21 nt, Artificial Sequence
  Description of Artificial Sequence: Synthetic oligonucleotide
gcgcacccagcauuuggccag

SEQ ID NO: 2097 - RNA, 21 nt, Artificial Sequence
  Description of Artificial Sequence: Synthetic oligonucleotide
gccaaaugcugggugcgcagc

SEQ ID NO: 2098 - RNA, 21 nt, Artificial Sequence
  Description of Artificial Sequence: Synthetic oligonucleotide
ugcgcacccagcauuuggcca

SEQ ID NO: 2099 - RNA, 21 nt, Artificial Sequence
  Description of Artificial Sequence: Synthetic oligonucleotide
ccaaaugcugggugcgcagcu

SEQ ID NO: 2100 - RNA, 21 nt, Artificial Sequence
  Description of Artificial Sequence: Synthetic oligonucleotide
cugcgcacccagcauuuggcc

SEQ ID NO: 2101 - RNA, 21 nt, Artificial Sequence
  Description of Artificial Sequence: Synthetic oligonucleotide
caaaugcugggugcgcagcuc

SEQ ID NO: 2102 - RNA, 21 nt, Artificial Sequence
  Description of Artificial Sequence: Synthetic oligonucleotide
gcugcgcacccagcauuuggc

SEQ ID NO: 2103 - RNA, 21 nt, Artificial Sequence
  Description of Artificial Sequence: Synthetic oligonucleotide
aaaugcugggugcgcagcucu

SEQ ID NO: 2104 - RNA, 21 nt, Artificial Sequence
  Description of Artificial Sequence: Synthetic oligonucleotide
agcugcgcacccagcauuugg

SEQ ID NO: 2105 - RNA, 21 nt, Artificial Sequence
  Description of Artificial Sequence: Synthetic oligonucleotide
aaugcugggugcgcagcucug

SEQ ID NO: 2106 - RNA, 21 nt, Artificial Sequence
  Description of Artificial Sequence: Synthetic oligonucleotide
gagcugcgcacccagcauuug

SEQ ID NO: 2107 - RNA, 21 nt, Artificial Sequence
  Description of Artificial Sequence: Synthetic oligonucleotide
augcugggugcgcagcucuga

SEQ ID NO: 2108 - RNA, 21 nt, Artificial Sequence
  Description of Artificial Sequence: Synthetic oligonucleotide
agagcugcgcacccagcauuu

SEQ ID NO: 2109 - RNA, 21 nt, Artificial Sequence
  Description of Artificial Sequence: Synthetic oligonucleotide
ugcugggugcgcagcucugac

SEQ ID NO: 2110 - RNA, 21 nt, Artificial Sequence
  Description of Artificial Sequence: Synthetic oligonucleotide
cagagcugcgcacccagcauu

SEQ ID NO: 2111 - RNA, 21 nt, Artificial Sequence
  Description of Artificial Sequence: Synthetic oligonucleotide
gcugggugcgcagcucugacu

SEQ ID NO: 2112 - RNA, 21 nt, Artificial Sequence
  Description of Artificial Sequence: Synthetic oligonucleotide
ucagagcugcgcacccagcau

SEQ ID NO: 2113 - RNA, 21 nt, Artificial Sequence
  Description of Artificial Sequence: Synthetic oligonucleotide
cugggugcgcagcucugacuu

SEQ ID NO: 2114 - RNA, 21 nt, Artificial Sequence
  Description of Artificial Sequence: Synthetic oligonucleotide
gucagagcugcgcacccagca

SEQ ID NO: 2115 - RNA, 21 nt, Artificial Sequence
  Description of Artificial Sequence: Synthetic oligonucleotide
ugggugcgcagcucugacuuc

SEQ ID NO: 2116 - RNA, 21 nt, Artificial Sequence
  Description of Artificial Sequence: Synthetic oligonucleotide
agucagagcugcgcacccagc

SEQ ID NO: 2117 - RNA, 21 nt, Artificial Sequence
  Description of Artificial Sequence: Synthetic oligonucleotide
gggugcgcagcucugacuucc

SEQ ID NO: 2118 - RNA, 21 nt, Artificial Sequence
  Description of Artificial Sequence: Synthetic oligonucleotide
aagucagagcugcgcacccag

SEQ ID NO: 2119 - RNA, 21 nt, Artificial Sequence
  Description of Artificial Sequence: Synthetic oligonucleotide
ggugcgcagcucugacuucca

SEQ ID NO: 2120 - RNA, 21 nt, Artificial Sequence
  Description of Artificial Sequence: Synthetic oligonucleotide
gaagucagagcugcgcaccca

SEQ ID NO: 2121 - RNA, 21 nt, Artificial Sequence
  Description of Artificial Sequence: Synthetic oligonucleotide
gugcgcagcucugacuuccag

SEQ ID NO: 2122 - RNA, 21 nt, Artificial Sequence
  Description of Artificial Sequence: Synthetic oligonucleotide
ggaagucagagcugcgcaccc

SEQ ID NO: 2123 - RNA, 21 nt, Artificial Sequence
  Description of Artificial Sequence: Synthetic oligonucleotide
ugcgcagcucugacuuccagc

SEQ ID NO: 2124 - RNA, 21 nt, Artificial Sequence
  Description of Artificial Sequence: Synthetic oligonucleotide
uggaagucagagcugcgcacc

SEQ ID NO: 2125 - RNA, 21 nt, Artificial Sequence
  Description of Artificial Sequence: Synthetic oligonucleotide
gcgcagcucugacuuccagcu

SEQ ID NO: 2126 - RNA, 21 nt, Artificial Sequence
  Description of Artificial Sequence: Synthetic oligonucleotide
cuggaagucagagcugcgcac

SEQ ID NO: 2127 - RNA, 21 nt, Artificial Sequence
  Description of Artificial Sequence: Synthetic oligonucleotide
cgcagcucugacuuccagcuc

SEQ ID NO: 2128 - RNA, 21 nt, Artificial Sequence
  Description of Artificial Sequence: Synthetic oligonucleotide
gcuggaagucagagcugcgca

SEQ ID NO: 2129 - RNA, 21 nt, Artificial Sequence
  Description of Artificial Sequence: Synthetic oligonucleotide
gcagcucugacuuccagcucc

SEQ ID NO: 2130 - RNA, 21 nt, Artificial Sequence
  Description of Artificial Sequence: Synthetic oligonucleotide
agcuggaagucagagcugcgc

SEQ ID NO: 2131 - RNA, 21 nt, Artificial Sequence
  Description of Artificial Sequence: Synthetic oligonucleotide
cagcucugacuuccagcucca

SEQ ID NO: 2132 - RNA, 21 nt, Artificial Sequence
  Description of Artificial Sequence: Synthetic oligonucleotide
gagcuggaagucagagcugcg

SEQ ID NO: 2133 - RNA, 21 nt, Artificial Sequence
  Description of Artificial Sequence: Synthetic oligonucleotide
agcucugacuuccagcuccau

SEQ ID NO: 2134 - RNA, 21 nt, Artificial Sequence
  Description of Artificial Sequence: Synthetic oligonucleotide
ggagcuggaagucagagcugc

SEQ ID NO: 2135 - RNA, 21 nt, Artificial Sequence
  Description of Artificial Sequence: Synthetic oligonucleotide
gcucugacuuccagcuccaug

SEQ ID NO: 2136 - RNA, 21 nt, Artificial Sequence
  Description of Artificial Sequence: Synthetic oligonucleotide
uggagcuggaagucagagcug

SEQ ID NO: 2137 - RNA, 21 nt, Artificial Sequence
  Description of Artificial Sequence: Synthetic oligonucleotide
cucugacuuccagcuccauga

SEQ ID NO: 2138 - RNA, 21 nt, Artificial Sequence
  Description of Artificial Sequence: Synthetic oligonucleotide
auggagcuggaagucagagcu

SEQ ID NO: 2139 - RNA, 21 nt, Artificial Sequence
  Description of Artificial Sequence: Synthetic oligonucleotide
ucugacuuccagcuccaugag

SEQ ID NO: 2140 - RNA, 21 nt, Artificial Sequence
  Description of Artificial Sequence: Synthetic oligonucleotide
cauggagcuggaagucagagc

SEQ ID NO: 2141 - RNA, 21 nt, Artificial Sequence
  Description of Artificial Sequence: Synthetic oligonucleotide
cugacuuccagcuccaugagc

SEQ ID NO: 2142 - RNA, 21 nt, Artificial Sequence
  Description of Artificial Sequence: Synthetic oligonucleotide
ucauggagcuggaagucagag

SEQ ID NO: 2143 - RNA, 21 nt, Artificial Sequence
  Description of Artificial Sequence: Synthetic oligonucleotide
ugacuuccagcuccaugagcu

SEQ ID NO: 2144 - RNA, 21 nt, Artificial Sequence
  Description of Artificial Sequence: Synthetic oligonucleotide
cucauggagcuggaagucaga

SEQ ID NO: 2145 - RNA, 21 nt, Artificial Sequence
  Description of Artificial Sequence: Synthetic oligonucleotide
gacuuccagcuccaugagcug

SEQ ID NO: 2146 - RNA, 21 nt, Artificial Sequence
  Description of Artificial Sequence: Synthetic oligonucleotide
gcucauggagcuggaagucag

SEQ ID NO: 2147 - RNA, 21 nt, Artificial Sequence
  Description of Artificial Sequence: Synthetic oligonucleotide
acuuccagcuccaugagcugc

SEQ ID NO: 2148 - RNA, 21 nt, Artificial Sequence
  Description of Artificial Sequence: Synthetic oligonucleotide
agcucauggagcuggaaguca

SEQ ID NO: 2149 - RNA, 21 nt, Artificial Sequence
  Description of Artificial Sequence: Synthetic oligonucleotide
cuuccagcuccaugagcugca

SEQ ID NO: 2150 - RNA, 21 nt, Artificial Sequence
  Description of Artificial Sequence: Synthetic oligonucleotide
cagcucauggagcuggaaguc

SEQ ID NO: 2151 - RNA, 21 nt, Artificial Sequence
  Description of Artificial Sequence: Synthetic oligonucleotide
uuccagcuccaugagcugcag

SEQ ID NO: 2152 - RNA, 21 nt, Artificial Sequence
  Description of Artificial Sequence: Synthetic oligonucleotide
gcagcucauggagcuggaagu

SEQ ID NO: 2153 - RNA, 21 nt, Artificial Sequence
  Description of Artificial Sequence: Synthetic oligonucleotide
uccagcuccaugagcugcagu

SEQ ID NO: 2154 - RNA, 21 nt, Artificial Sequence
  Description of Artificial Sequence: Synthetic oligonucleotide
ugcagcucauggagcuggaag

SEQ ID NO: 2155 - RNA, 21 nt, Artificial Sequence
  Description of Artificial Sequence: Synthetic oligonucleotide
ccagcuccaugagcugcaguc

SEQ ID NO: 2156 - RNA, 21 nt, Artificial Sequence
  Description of Artificial Sequence: Synthetic oligonucleotide
cugcagcucauggagcuggaa

SEQ ID NO: 2157 - RNA, 21 nt, Artificial Sequence
  Description of Artificial Sequence: Synthetic oligonucleotide
cagcuccaugagcugcagucu

SEQ ID NO: 2158 - RNA, 21 nt, Artificial Sequence
  Description of Artificial Sequence: Synthetic oligonucleotide
acugcagcucauggagcugga

SEQ ID NO: 2159 - RNA, 21 nt, Artificial Sequence
  Description of Artificial Sequence: Synthetic oligonucleotide
agcuccaugagcugcagucuc

SEQ ID NO: 2160 - RNA, 21 nt, Artificial Sequence
  Description of Artificial Sequence: Synthetic oligonucleotide
gacugcagcucauggagcugg

SEQ ID NO: 2161 - RNA, 21 nt, Artificial Sequence
  Description of Artificial Sequence: Synthetic oligonucleotide
gcuccaugagcugcagucuca

SEQ ID NO: 2162 - RNA, 21 nt, Artificial Sequence
  Description of Artificial Sequence: Synthetic oligonucleotide
agacugcagcucauggagcug

SEQ ID NO: 2163 - RNA, 21 nt, Artificial Sequence
  Description of Artificial Sequence: Synthetic oligonucleotide
cuccaugagcugcagucucau

SEQ ID NO: 2164 - RNA, 21 nt, Artificial Sequence
  Description of Artificial Sequence: Synthetic oligonucleotide
gagacugcagcucauggagcu

SEQ ID NO: 2165 - RNA, 21 nt, Artificial Sequence
  Description of Artificial Sequence: Synthetic oligonucleotide
uccaugagcugcagucucauc

SEQ ID NO: 2166 - RNA, 21 nt, Artificial Sequence
  Description of Artificial Sequence: Synthetic oligonucleotide
ugagacugcagcucauggagc

SEQ ID NO: 2167 - RNA, 21 nt, Artificial Sequence
  Description of Artificial Sequence: Synthetic oligonucleotide
ccaugagcugcagucucaucu

SEQ ID NO: 2168 - RNA, 21 nt, Artificial Sequence
  Description of Artificial Sequence: Synthetic oligonucleotide
augagacugcagcucauggag

SEQ ID NO: 2169 - RNA, 21 nt, Artificial Sequence
  Description of Artificial Sequence: Synthetic oligonucleotide
caugagcugcagucucaucuu

SEQ ID NO: 2170 - RNA, 21 nt, Artificial Sequence
  Description of Artificial Sequence: Synthetic oligonucleotide
gaugagacugcagcucaugga

SEQ ID NO: 2171 - RNA, 21 nt, Artificial Sequence
  Description of Artificial Sequence: Synthetic oligonucleotide
augagcugcagucucaucuuc

SEQ ID NO: 2172 - RNA, 21 nt, Artificial Sequence
  Description of Artificial Sequence: Synthetic oligonucleotide
agaugagacugcagcucaugg

SEQ ID NO: 2173 - RNA, 21 nt, Artificial Sequence
  Description of Artificial Sequence: Synthetic oligonucleotide
ugagcugcagucucaucuucu

SEQ ID NO: 2174 - RNA, 21 nt, Artificial Sequence
  Description of Artificial Sequence: Synthetic oligonucleotide
aagaugagacugcagcucaug

SEQ ID NO: 2175 - RNA, 21 nt, Artificial Sequence
  Description of Artificial Sequence: Synthetic oligonucleotide
gagcugcagucucaucuucug

SEQ ID NO: 2176 - RNA, 21 nt, Artificial Sequence
  Description of Artificial Sequence: Synthetic oligonucleotide
gaagaugagacugcagcucau

SEQ ID NO: 2177 - RNA, 21 nt, Artificial Sequence
  Description of Artificial Sequence: Synthetic oligonucleotide
agcugcagucucaucuucuga

SEQ ID NO: 2178 - RNA, 21 nt, Artificial Sequence
  Description of Artificial Sequence: Synthetic oligonucleotide
agaagaugagacugcagcuca

SEQ ID NO: 2179 - RNA, 21 nt, Artificial Sequence
  Description of Artificial Sequence: Synthetic oligonucleotide
gcugcagucucaucuucugag

SEQ ID NO: 2180 - RNA, 21 nt, Artificial Sequence
  Description of Artificial Sequence: Synthetic oligonucleotide
cagaagaugagacugcagcuc

SEQ ID NO: 2181 - RNA, 21 nt, Artificial Sequence
  Description of Artificial Sequence: Synthetic oligonucleotide
cugcagucucaucuucugagg

SEQ ID NO: 2182 - RNA, 21 nt, Artificial Sequence
  Description of Artificial Sequence: Synthetic oligonucleotide
ucagaagaugagacugcagcu

SEQ ID NO: 2183 - RNA, 21 nt, Artificial Sequence
  Description of Artificial Sequence: Synthetic oligonucleotide
ugcagucucaucuucugaggg

SEQ ID NO: 2184 - RNA, 21 nt, Artificial Sequence
  Description of Artificial Sequence: Synthetic oligonucleotide
cucagaagaugagacugcagc

SEQ ID NO: 2185 - RNA, 21 nt, Artificial Sequence
  Description of Artificial Sequence: Synthetic oligonucleotide
gcagucucaucuucugagggg

SEQ ID NO: 2186 - RNA, 21 nt, Artificial Sequence
  Description of Artificial Sequence: Synthetic oligonucleotide
ccucagaagaugagacugcag

SEQ ID NO: 2187 - RNA, 21 nt, Artificial Sequence
  Description of Artificial Sequence: Synthetic oligonucleotide
cagucucaucuucugagggga

SEQ ID NO: 2188 - RNA, 21 nt, Artificial Sequence
  Description of Artificial Sequence: Synthetic oligonucleotide
cccucagaagaugagacugca

SEQ ID NO: 2189 - RNA, 21 nt, Artificial Sequence
  Description of Artificial Sequence: Synthetic oligonucleotide
agucucaucuucugaggggac

SEQ ID NO: 2190 - RNA, 21 nt, Artificial Sequence
  Description of Artificial Sequence: Synthetic oligonucleotide
ccccucagaagaugagacugc

SEQ ID NO: 2191 - RNA, 21 nt, Artificial Sequence
  Description of Artificial Sequence: Synthetic oligonucleotide
gucucaucuucugaggggaca

SEQ ID NO: 2192 - RNA, 21 nt, Artificial Sequence
  Description of Artificial Sequence: Synthetic oligonucleotide
uccccucagaagaugagacug

SEQ ID NO: 2193 - RNA, 21 nt, Artificial Sequence
  Description of Artificial Sequence: Synthetic oligonucleotide
ucucaucuucugaggggacac

SEQ ID NO: 2194 - RNA, 21 nt, Artificial Sequence
  Description of Artificial Sequence: Synthetic oligonucleotide
guccccucagaagaugagacu

SEQ ID NO: 2195 - RNA, 21 nt, Artificial Sequence
  Description of Artificial Sequence: Synthetic oligonucleotide
cucaucuucugaggggacacu

SEQ ID NO: 2196 - RNA, 21 nt, Artificial Sequence
  Description of Artificial Sequence: Synthetic oligonucleotide
uguccccucagaagaugagac

SEQ ID NO: 2197 - RNA, 21 nt, Artificial Sequence
  Description of Artificial Sequence: Synthetic oligonucleotide
ucaucuucugaggggacacuu

SEQ ID NO: 2198 - RNA, 21 nt, Artificial Sequence
  Description of Artificial Sequence: Synthetic oligonucleotide
guguccccucagaagaugaga

SEQ ID NO: 2199 - RNA, 21 nt, Artificial Sequence
  Description of Artificial Sequence: Synthetic oligonucleotide
caucuucugaggggacacuug

SEQ ID NO: 2200 - RNA, 21 nt, Artificial Sequence
  Description of Artificial Sequence: Synthetic oligonucleotide
aguguccccucagaagaugag

SEQ ID NO: 2201 - RNA, 21 nt, Artificial Sequence
  Description of Artificial Sequence: Synthetic oligonucleotide
aucuucugaggggacacuuga

SEQ ID NO: 2202 - RNA, 21 nt, Artificial Sequence
  Description of Artificial Sequence: Synthetic oligonucleotide
aaguguccccucagaagauga

SEQ ID NO: 2203 - RNA, 21 nt, Artificial Sequence
  Description of Artificial Sequence: Synthetic oligonucleotide
ucuucugaggggacacuugau

SEQ ID NO: 2204 - RNA, 21 nt, Artificial Sequence
  Description of Artificial Sequence: Synthetic oligonucleotide
caaguguccccucagaagaug

SEQ ID NO: 2205 - RNA, 21 nt, Artificial Sequence
  Description of Artificial Sequence: Synthetic oligonucleotide
cuucugaggggacacuugaug

SEQ ID NO: 2206 - RNA, 21 nt, Artificial Sequence
  Description of Artificial Sequence: Synthetic oligonucleotide
ucaaguguccccucagaagau

SEQ ID NO: 2207 - RNA, 21 nt, Artificial Sequence
  Description of Artificial Sequence: Synthetic oligonucleotide
uucugaggggacacuugaugg

SEQ ID NO: 2208 - RNA, 21 nt, Artificial Sequence
  Description of Artificial Sequence: Synthetic oligonucleotide
aucaaguguccccucagaaga

SEQ ID NO: 2209 - RNA, 21 nt, Artificial Sequence
  Description of Artificial Sequence: Synthetic oligonucleotide
ucugaggggacacuugauggc

SEQ ID NO: 2210 - RNA, 21 nt, Artificial Sequence
  Description of Artificial Sequence: Synthetic oligonucleotide
caucaaguguccccucagaag

SEQ ID NO: 2211 - RNA, 21 nt, Artificial Sequence
  Description of Artificial Sequence: Synthetic oligonucleotide
cugaggggacacuugauggcu

SEQ ID NO: 2212 - RNA, 21 nt, Artificial Sequence
  Description of Artificial Sequence: Synthetic oligonucleotide
ccaucaaguguccccucagaa

SEQ ID NO: 2213 - RNA, 21 nt, Artificial Sequence
  Description of Artificial Sequence: Synthetic oligonucleotide
ugaggggacacuugauggcug

SEQ ID NO: 2214 - RNA, 21 nt, Artificial Sequence
  Description of Artificial Sequence: Synthetic oligonucleotide
gccaucaaguguccccucaga

SEQ ID NO: 2215 - RNA, 21 nt, Artificial Sequence
  Description of Artificial Sequence: Synthetic oligonucleotide
gaggggacacuugauggcuga

SEQ ID NO: 2216 - RNA, 21 nt, Artificial Sequence
  Description of Artificial Sequence: Synthetic oligonucleotide
agccaucaaguguccccucag

SEQ ID NO: 2217 - RNA, 21 nt, Artificial Sequence
  Description of Artificial Sequence: Synthetic oligonucleotide
aggggacacuugauggcugag

SEQ ID NO: 2218 - RNA, 21 nt, Artificial Sequence
  Description of Artificial Sequence: Synthetic oligonucleotide
cagccaucaaguguccccuca

SEQ ID NO: 2219 - RNA, 21 nt, Artificial Sequence
  Description of Artificial Sequence: Synthetic oligonucleotide
ggggacacuugauggcugagg

SEQ ID NO: 2220 - RNA, 21 nt, Artificial Sequence
  Description of Artificial Sequence: Synthetic oligonucleotide
ucagccaucaaguguccccuc

SEQ ID NO: 2221 - RNA, 21 nt, Artificial Sequence
  Description of Artificial Sequence: Synthetic oligonucleotide
gggacacuugauggcugaggu

SEQ ID NO: 2222 - RNA, 21 nt, Artificial Sequence
  Description of Artificial Sequence: Synthetic oligonucleotide
cucagccaucaaguguccccu

SEQ ID NO: 2223 - RNA, 21 nt, Artificial Sequence
  Description of Artificial Sequence: Synthetic oligonucleotide
ggacacuugauggcugagguc

SEQ ID NO: 2224 - RNA, 21 nt, Artificial Sequence
  Description of Artificial Sequence: Synthetic oligonucleotide
ccucagccaucaagugucccc

SEQ ID NO: 2225 - RNA, 21 nt, Artificial Sequence
  Description of Artificial Sequence: Synthetic oligonucleotide
gacacuugauggcugagguca

SEQ ID NO: 2226 - RNA, 21 nt, Artificial Sequence
  Description of Artificial Sequence: Synthetic oligonucleotide
accucagccaucaaguguccc

SEQ ID NO: 2227 - RNA, 21 nt, Artificial Sequence
  Description of Artificial Sequence: Synthetic oligonucleotide
acacuugauggcugaggucau

SEQ ID NO: 2228 - RNA, 21 nt, Artificial Sequence
  Description of Artificial Sequence: Synthetic oligonucleotide
gaccucagccaucaagugucc

SEQ ID NO: 2229 - RNA, 21 nt, Artificial Sequence
  Description of Artificial Sequence: Synthetic oligonucleotide
cacuugauggcugaggucauu

SEQ ID NO: 2230 - RNA, 21 nt, Artificial Sequence
  Description of Artificial Sequence: Synthetic oligonucleotide
ugaccucagccaucaaguguc

SEQ ID NO: 2231 - RNA, 21 nt, Artificial Sequence
  Description of Artificial Sequence: Synthetic oligonucleotide
acuugauggcugaggucauug

SEQ ID NO: 2232 - RNA, 21 nt, Artificial Sequence
  Description of Artificial Sequence: Synthetic oligonucleotide
augaccucagccaucaagugu

SEQ ID NO: 2233 - RNA, 21 nt, Artificial Sequence
  Description of Artificial Sequence: Synthetic oligonucleotide
cuugauggcugaggucauugu

SEQ ID NO: 2234 - RNA, 21 nt, Artificial Sequence
  Description of Artificial Sequence: Synthetic oligonucleotide
aaugaccucagccaucaagug

SEQ ID NO: 2235 - RNA, 21 nt, Artificial Sequence
  Description of Artificial Sequence: Synthetic oligonucleotide
uugauggcugaggucauuguu

SEQ ID NO: 2236 - RNA, 21 nt, Artificial Sequence
  Description of Artificial Sequence: Synthetic oligonucleotide
caaugaccucagccaucaagu

SEQ ID NO: 2237 - RNA, 21 nt, Artificial Sequence
  Description of Artificial Sequence: Synthetic oligonucleotide
ugauggcugaggucauuguug

SEQ ID NO: 2238 - RNA, 21 nt, Artificial Sequence
  Description of Artificial Sequence: Synthetic oligonucleotide
acaaugaccucagccaucaag

SEQ ID NO: 2239 - RNA, 21 nt, Artificial Sequence
  Description of Artificial Sequence: Synthetic oligonucleotide
gauggcugaggucauuguugu

SEQ ID NO: 2240 - RNA, 21 nt, Artificial Sequence
  Description of Artificial Sequence: Synthetic oligonucleotide
aacaaugaccucagccaucaa

SEQ ID NO: 2241 - RNA, 21 nt, Artificial Sequence
  Description of Artificial Sequence: Synthetic oligonucleotide
auggcugaggucauuguugug

SEQ ID NO: 2242 - RNA, 21 nt, Artificial Sequence
  Description of Artificial Sequence: Synthetic oligonucleotide
caacaaugaccucagccauca

SEQ ID NO: 2243 - RNA, 21 nt, Artificial Sequence
  Description of Artificial Sequence: Synthetic oligonucleotide
uggcugaggucauuguugugg

SEQ ID NO: 2244 - RNA, 21 nt, Artificial Sequence
  Description of Artificial Sequence: Synthetic oligonucleotide
acaacaaugaccucagccauc

SEQ ID NO: 2245 - RNA, 21 nt, Artificial Sequence
  Description of Artificial Sequence: Synthetic oligonucleotide
ggcugaggucauuguuguggc

SEQ ID NO: 2246 - RNA, 21 nt, Artificial Sequence
  Description of Artificial Sequence: Synthetic oligonucleotide
cacaacaaugaccucagccau

SEQ ID NO: 2247 - RNA, 21 nt, Artificial Sequence
  Description of Artificial Sequence: Synthetic oligonucleotide
gcugaggucauuguuguggcc

SEQ ID NO: 2248 - RNA, 21 nt, Artificial Sequence
  Description of Artificial Sequence: Synthetic oligonucleotide
ccacaacaaugaccucagcca

SEQ ID NO: 2249 - RNA, 21 nt, Artificial Sequence
  Description of Artificial Sequence: Synthetic oligonucleotide
cugaggucauuguuguggcca

SEQ ID NO: 2250 - RNA, 21 nt, Artificial Sequence
  Description of Artificial Sequence: Synthetic oligonucleotide
gccacaacaaugaccucagcc

SEQ ID NO: 2251 - RNA, 21 nt, Artificial Sequence
  Description of Artificial Sequence: Synthetic oligonucleotide
ugaggucauuguuguggccac

SEQ ID NO: 2252 - RNA, 21 nt, Artificial Sequence
  Description of Artificial Sequence: Synthetic oligonucleotide
ggccacaacaaugaccucagc

SEQ ID NO: 2253 - RNA, 21 nt, Artificial Sequence
  Description of Artificial Sequence: Synthetic oligonucleotide
gaggucauuguuguggccacc

SEQ ID NO: 2254 - RNA, 21 nt, Artificial Sequence
  Description of Artificial Sequence: Synthetic oligonucleotide
uggccacaacaaugaccucag

SEQ ID NO: 2255 - RNA, 21 nt, Artificial Sequence
  Description of Artificial Sequence: Synthetic oligonucleotide
aggucauuguuguggccacca

SEQ ID NO: 2256 - RNA, 21 nt, Artificial Sequence
  Description of Artificial Sequence: Synthetic oligonucleotide
guggccacaacaaugaccuca

SEQ ID NO: 2257 - RNA, 21 nt, Artificial Sequence
  Description of Artificial Sequence: Synthetic oligonucleotide
ggucauuguuguggccaccau

SEQ ID NO: 2258 - RNA, 21 nt, Artificial Sequence
  Description of Artificial Sequence: Synthetic oligonucleotide
gguggccacaacaaugaccuc

SEQ ID NO: 2259 - RNA, 21 nt, Artificial Sequence
  Description of Artificial Sequence: Synthetic oligonucleotide
gucauuguuguggccaccaug

SEQ ID NO: 2260 - RNA, 21 nt, Artificial Sequence
  Description of Artificial Sequence: Synthetic oligonucleotide
ugguggccacaacaaugaccu

SEQ ID NO: 2261 - RNA, 21 nt, Artificial Sequence
  Description of Artificial Sequence: Synthetic oligonucleotide
ucauuguuguggccaccauga

SEQ ID NO: 2262 - RNA, 21 nt, Artificial Sequence
  Description of Artificial Sequence: Synthetic oligonucleotide
augguggccacaacaaugacc

SEQ ID NO: 2263 - RNA, 21 nt, Artificial Sequence
  Description of Artificial Sequence: Synthetic oligonucleotide
cauuguuguggccaccaugag

SEQ ID NO: 2264 - RNA, 21 nt, Artificial Sequence
  Description of Artificial Sequence: Synthetic oligonucleotide
caugguggccacaacaaugac

SEQ ID NO: 2265 - RNA, 21 nt, Artificial Sequence
  Description of Artificial Sequence: Synthetic oligonucleotide
auuguuguggccaccaugagg

SEQ ID NO: 2266 - RNA, 21 nt, Artificial Sequence
  Description of Artificial Sequence: Synthetic oligonucleotide
ucaugguggccacaacaauga

SEQ ID NO: 2267 - RNA, 21 nt, Artificial Sequence
  Description of Artificial Sequence: Synthetic oligonucleotide
uuguuguggccaccaugaggu

SEQ ID NO: 2268 - RNA, 21 nt, Artificial Sequence
  Description of Artificial Sequence: Synthetic oligonucleotide
cucaugguggccacaacaaug

SEQ ID NO: 2269 - RNA, 21 nt, Artificial Sequence
  Description of Artificial Sequence: Synthetic oligonucleotide
uguuguggccaccaugaggug

SEQ ID NO: 2270 - RNA, 21 nt, Artificial Sequence
  Description of Artificial Sequence: Synthetic oligonucleotide
ccucaugguggccacaacaau

SEQ ID NO: 2271 - RNA, 21 nt, Artificial Sequence
  Description of Artificial Sequence: Synthetic oligonucleotide
guuguggccaccaugaggugc

SEQ ID NO: 2272 - RNA, 21 nt, Artificial Sequence
  Description of Artificial Sequence: Synthetic oligonucleotide
accucaugguggccacaacaa

SEQ ID NO: 2273 - RNA, 21 nt, Artificial Sequence
  Description of Artificial Sequence: Synthetic oligonucleotide
uuguggccaccaugaggugcc

SEQ ID NO: 2274 - RNA, 21 nt, Artificial Sequence
  Description of Artificial Sequence: Synthetic oligonucleotide
caccucaugguggccacaaca

SEQ ID NO: 2275 - RNA, 21 nt, Artificial Sequence
  Description of Artificial Sequence: Synthetic oligonucleotide
uguggccaccaugaggugccu

SEQ ID NO: 2276 - RNA, 21 nt, Artificial Sequence
  Description of Artificial Sequence: Synthetic oligonucleotide
gcaccucaugguggccacaac

SEQ ID NO: 2277 - RNA, 21 nt, Artificial Sequence
  Description of Artificial Sequence: Synthetic oligonucleotide
guggccaccaugaggugccug

SEQ ID NO: 2278 - RNA, 21 nt, Artificial Sequence
  Description of Artificial Sequence: Synthetic oligonucleotide
ggcaccucaugguggccacaa

SEQ ID NO: 2279 - RNA, 21 nt, Artificial Sequence
  Description of Artificial Sequence: Synthetic oligonucleotide
uggccaccaugaggugccugc

SEQ ID NO: 2280 - RNA, 21 nt, Artificial Sequence
  Description of Artificial Sequence: Synthetic oligonucleotide
aggcaccucaugguggccaca

SEQ ID NO: 2281 - RNA, 21 nt, Artificial Sequence
  Description of Artificial Sequence: Synthetic oligonucleotide
ggccaccaugaggugccugcc

SEQ ID NO: 2282 - RNA, 21 nt, Artificial Sequence
  Description of Artificial Sequence: Synthetic oligonucleotide
caggcaccucaugguggccac

SEQ ID NO: 2283 - RNA, 21 nt, Artificial Sequence
  Description of Artificial Sequence: Synthetic oligonucleotide
gccaccaugaggugccugccg

SEQ ID NO: 2284 - RNA, 21 nt, Artificial Sequence
  Description of Artificial Sequence: Synthetic oligonucleotide
gcaggcaccucaugguggcca

SEQ ID NO: 2285 - RNA, 21 nt, Artificial Sequence
  Description of Artificial Sequence: Synthetic oligonucleotide
ccaccaugaggugccugccgu

SEQ ID NO: 2286 - RNA, 21 nt, Artificial Sequence
  Description of Artificial Sequence: Synthetic oligonucleotide
ggcaggcaccucaugguggcc

SEQ ID NO: 2287 - RNA, 21 nt, Artificial Sequence
  Description of Artificial Sequence: Synthetic oligonucleotide
caccaugaggugccugccguc

SEQ ID NO: 2288 - RNA, 21 nt, Artificial Sequence
  Description of Artificial Sequence: Synthetic oligonucleotide
cggcaggcaccucaugguggc

SEQ ID NO: 2289 - RNA, 21 nt, Artificial Sequence
  Description of Artificial Sequence: Synthetic oligonucleotide
accaugaggugccugccgucg

SEQ ID NO: 2290 - RNA, 21 nt, Artificial Sequence
  Description of Artificial Sequence: Synthetic oligonucleotide
acggcaggcaccucauggugg

SEQ ID NO: 2291 - RNA, 21 nt, Artificial Sequence
  Description of Artificial Sequence: Synthetic oligonucleotide
ccaugaggugccugccgucga

SEQ ID NO: 2292 - RNA, 21 nt, Artificial Sequence
  Description of Artificial Sequence: Synthetic oligonucleotide
gacggcaggcaccucauggug

SEQ ID NO: 2293 - RNA, 21 nt, Artificial Sequence
  Description of Artificial Sequence: Synthetic oligonucleotide
caugaggugccugccgucgau

SEQ ID NO: 2294 - RNA, 21 nt, Artificial Sequence
  Description of Artificial Sequence: Synthetic oligonucleotide
cgacggcaggcaccucauggu

SEQ ID NO: 2295 - RNA, 21 nt, Artificial Sequence
  Description of Artificial Sequence: Synthetic oligonucleotide
augaggugccugccgucgaua

SEQ ID NO: 2296 - RNA, 21 nt, Artificial Sequence
  Description of Artificial Sequence: Synthetic oligonucleotide
ucgacggcaggcaccucaugg

SEQ ID NO: 2297 - RNA, 21 nt, Artificial Sequence
  Description of Artificial Sequence: Synthetic oligonucleotide
ugaggugccugccgucgauac

SEQ ID NO: 2298 - RNA, 21 nt, Artificial Sequence
  Description of Artificial Sequence: Synthetic oligonucleotide
aucgacggcaggcaccucaug

SEQ ID NO: 2299 - RNA, 21 nt, Artificial Sequence
  Description of Artificial Sequence: Synthetic oligonucleotide
gaggugccugccgucgauaca

SEQ ID NO: 2300 - RNA, 21 nt, Artificial Sequence
  Description of Artificial Sequence: Synthetic oligonucleotide
uaucgacggcaggcaccucau

SEQ ID NO: 2301 - RNA, 21 nt, Artificial Sequence
  Description of Artificial Sequence: Synthetic oligonucleotide
aggugccugccgucgauacau

SEQ ID NO: 2302 - RNA, 21 nt, Artificial Sequence
  Description of Artificial Sequence: Synthetic oligonucleotide
guaucgacggcaggcaccuca

SEQ ID NO: 2303 - RNA, 21 nt, Artificial Sequence
  Description of Artificial Sequence: Synthetic oligonucleotide
ggugccugccgucgauacauc

SEQ ID NO: 2304 - RNA, 21 nt, Artificial Sequence
  Description of Artificial Sequence: Synthetic oligonucleotide
uguaucgacggcaggcaccuc

SEQ ID NO: 2305 - RNA, 21 nt, Artificial Sequence
  Description of Artificial Sequence: Synthetic oligonucleotide
gugccugccgucgauacaucc

SEQ ID NO: 2306 - RNA, 21 nt, Artificial Sequence
  Description of Artificial Sequence: Synthetic oligonucleotide
auguaucgacggcaggcaccu

SEQ ID NO: 2307 - RNA, 21 nt, Artificial Sequence
  Description of Artificial Sequence: Synthetic oligonucleotide
ugccugccgucgauacauccu

SEQ ID NO: 2308 - RNA, 21 nt, Artificial Sequence
  Description of Artificial Sequence: Synthetic oligonucleotide
gauguaucgacggcaggcacc

SEQ ID NO: 2309 - RNA, 21 nt, Artificial Sequence
  Description of Artificial Sequence: Synthetic oligonucleotide
gccugccgucgauacauccua

SEQ ID NO: 2310 - RNA, 21 nt, Artificial Sequence
  Description of Artificial Sequence: Synthetic oligonucleotide
ggauguaucgacggcaggcac

SEQ ID NO: 2311 - RNA, 21 nt, Artificial Sequence
  Description of Artificial Sequence: Synthetic oligonucleotide
ccugccgucgauacauccuau

SEQ ID NO: 2312 - RNA, 21 nt, Artificial Sequence
  Description of Artificial Sequence: Synthetic oligonucleotide
aggauguaucgacggcaggca

SEQ ID NO: 2313 - RNA, 21 nt, Artificial Sequence
  Description of Artificial Sequence: Synthetic oligonucleotide
cugccgucgauacauccuauc

SEQ ID NO: 2314 - RNA, 21 nt, Artificial Sequence
  Description of Artificial Sequence: Synthetic oligonucleotide
uaggauguaucgacggcaggc

SEQ ID NO: 2315 - RNA, 21 nt, Artificial Sequence
  Description of Artificial Sequence: Synthetic oligonucleotide
ugccgucgauacauccuaucu

SEQ ID NO: 2316 - RNA, 21 nt, Artificial Sequence
  Description of Artificial Sequence: Synthetic oligonucleotide
auaggauguaucgacggcagg

SEQ ID NO: 2317 - RNA, 21 nt, Artificial Sequence
  Description of Artificial Sequence: Synthetic oligonucleotide
gccgucgauacauccuaucuu

SEQ ID NO: 2318 - RNA, 21 nt, Artificial Sequence
  Description of Artificial Sequence: Synthetic oligonucleotide
gauaggauguaucgacggcag

SEQ ID NO: 2319 - RNA, 21 nt, Artificial Sequence
  Description of Artificial Sequence: Synthetic oligonucleotide
ccgucgauacauccuaucuuc

SEQ ID NO: 2320 - RNA, 21 nt, Artificial Sequence
  Description of Artificial Sequence: Synthetic oligonucleotide
agauaggauguaucgacggca

SEQ ID NO: 2321 - RNA, 21 nt, Artificial Sequence
  Description of Artificial Sequence: Synthetic oligonucleotide
cgucgauacauccuaucuuca

SEQ ID NO: 2322 - RNA, 21 nt, Artificial Sequence
  Description of Artificial Sequence: Synthetic oligonucleotide
aagauaggauguaucgacggc

SEQ ID NO: 2323 - RNA, 21 nt, Artificial Sequence
  Description of Artificial Sequence: Synthetic oligonucleotide
gucgauacauccuaucuucaa

SEQ ID NO: 2324 - RNA, 21 nt, Artificial Sequence
  Description of Artificial Sequence: Synthetic oligonucleotide
gaagauaggauguaucgacgg

SEQ ID NO: 2325 - RNA, 21 nt, Artificial Sequence
  Description of Artificial Sequence: Synthetic oligonucleotide
ucgauacauccuaucuucaag

SEQ ID NO: 2326 - RNA, 21 nt, Artificial Sequence
  Description of Artificial Sequence: Synthetic oligonucleotide
ugaagauaggauguaucgacg

SEQ ID NO: 2327 - RNA, 21 nt, Artificial Sequence
  Description of Artificial Sequence: Synthetic oligonucleotide
cgauacauccuaucuucaagc

SEQ ID NO: 2328 - RNA, 21 nt, Artificial Sequence
  Description of Artificial Sequence: Synthetic oligonucleotide
uugaagauaggauguaucgac

SEQ ID NO: 2329 - RNA, 21 nt, Artificial Sequence
  Description of Artificial Sequence: Synthetic oligonucleotide
gauacauccuaucuucaagcu

SEQ ID NO: 2330 - RNA, 21 nt, Artificial Sequence
  Description of Artificial Sequence: Synthetic oligonucleotide
cuugaagauaggauguaucga

SEQ ID NO: 2331 - RNA, 21 nt, Artificial Sequence
  Description of Artificial Sequence: Synthetic oligonucleotide
auacauccuaucuucaagcuu

SEQ ID NO: 2332 - RNA, 21 nt, Artificial Sequence
  Description of Artificial Sequence: Synthetic oligonucleotide
gcuugaagauaggauguaucg

SEQ ID NO: 2333 - RNA, 21 nt, Artificial Sequence
  Description of Artificial Sequence: Synthetic oligonucleotide
uacauccuaucuucaagcuua

SEQ ID NO: 2334 - RNA, 21 nt, Artificial Sequence
  Description of Artificial Sequence: Synthetic oligonucleotide
agcuugaagauaggauguauc

SEQ ID NO: 2335 - RNA, 21 nt, Artificial Sequence
  Description of Artificial Sequence: Synthetic oligonucleotide
acauccuaucuucaagcuuau

SEQ ID NO: 2336 - RNA, 21 nt, Artificial Sequence
  Description of Artificial Sequence: Synthetic oligonucleotide
aagcuugaagauaggauguau

SEQ ID NO: 2337 - RNA, 21 nt, Artificial Sequence
  Description of Artificial Sequence: Synthetic oligonucleotide
cauccuaucuucaagcuuaua

SEQ ID NO: 2338 - RNA, 21 nt, Artificial Sequence
  Description of Artificial Sequence: Synthetic oligonucleotide
uaagcuugaagauaggaugua

SEQ ID NO: 2339 - RNA, 21 nt, Artificial Sequence
  Description of Artificial Sequence: Synthetic oligonucleotide
auccuaucuucaagcuuauaa

SEQ ID NO: 2340 - RNA, 21 nt, Artificial Sequence
  Description of Artificial Sequence: Synthetic oligonucleotide
auaagcuugaagauaggaugu

SEQ ID NO: 2341 - RNA, 21 nt, Artificial Sequence
  Description of Artificial Sequence: Synthetic oligonucleotide
uccuaucuucaagcuuauaau

SEQ ID NO: 2342 - RNA, 21 nt, Artificial Sequence
  Description of Artificial Sequence: Synthetic oligonucleotide
uauaagcuugaagauaggaug

SEQ ID NO: 2343 - RNA, 21 nt, Artificial Sequence
  Description of Artificial Sequence: Synthetic oligonucleotide
ccuaucuucaagcuuauaauu

SEQ ID NO: 2344 - RNA, 21 nt, Artificial Sequence
  Description of Artificial Sequence: Synthetic oligonucleotide
uuauaagcuugaagauaggau

SEQ ID NO: 2345 - RNA, 21 nt, Artificial Sequence
  Description of Artificial Sequence: Synthetic oligonucleotide
cuaucuucaagcuuauaauuc

SEQ ID NO: 2346 - RNA, 21 nt, Artificial Sequence
  Description of Artificial Sequence: Synthetic oligonucleotide
auuauaagcuugaagauagga

SEQ ID NO: 2347 - RNA, 21 nt, Artificial Sequence
  Description of Artificial Sequence: Synthetic oligonucleotide
uaucuucaagcuuauaauucc

SEQ ID NO: 2348 - RNA, 21 nt, Artificial Sequence
  Description of Artificial Sequence: Synthetic oligonucleotide
aauuauaagcuugaagauagg

SEQ ID NO: 2349 - RNA, 21 nt, Artificial Sequence
  Description of Artificial Sequence: Synthetic oligonucleotide
aucuucaagcuuauaauuccc

SEQ ID NO: 2350 - RNA, 21 nt, Artificial Sequence
  Description of Artificial Sequence: Synthetic oligonucleotide
gaauuauaagcuugaagauag

SEQ ID NO: 2351 - RNA, 21 nt, Artificial Sequence
  Description of Artificial Sequence: Synthetic oligonucleotide
ucuucaagcuuauaauucccc

SEQ ID NO: 2352 - RNA, 21 nt, Artificial Sequence
  Description of Artificial Sequence: Synthetic oligonucleotide
ggaauuauaagcuugaagaua

SEQ ID NO: 2353 - RNA, 21 nt, Artificial Sequence
  Description of Artificial Sequence: Synthetic oligonucleotide
cuucaagcuuauaauucccca

SEQ ID NO: 2354 - RNA, 21 nt, Artificial Sequence
  Description of Artificial Sequence: Synthetic oligonucleotide
gggaauuauaagcuugaagau

SEQ ID NO: 2355 - RNA, 21 nt, Artificial Sequence
  Description of Artificial Sequence: Synthetic oligonucleotide
uucaagcuuauaauuccccac

SEQ ID NO: 2356 - RNA, 21 nt, Artificial Sequence
  Description of Artificial Sequence: Synthetic oligonucleotide
ggggaauuauaagcuugaaga

SEQ ID NO: 2357 - RNA, 21 nt, Artificial Sequence
  Description of Artificial Sequence: Synthetic oligonucleotide
ucaagcuuauaauuccccacc

SEQ ID NO: 2358 - RNA, 21 nt, Artificial Sequence
  Description of Artificial Sequence: Synthetic oligonucleotide
uggggaauuauaagcuugaag

SEQ ID NO: 2359 - RNA, 21 nt, Artificial Sequence
  Description of Artificial Sequence: Synthetic oligonucleotide
caagcuuauaauuccccaccu

SEQ ID NO: 2360 - RNA, 21 nt, Artificial Sequence
  Description of Artificial Sequence: Synthetic oligonucleotide
guggggaauuauaagcuugaa

SEQ ID NO: 2361 - RNA, 21 nt, Artificial Sequence
  Description of Artificial Sequence: Synthetic oligonucleotide
aagcuuauaauuccccaccug

SEQ ID NO: 2362 - RNA, 21 nt, Artificial Sequence
  Description of Artificial Sequence: Synthetic oligonucleotide
gguggggaauuauaagcuuga

SEQ ID NO: 2363 - RNA, 21 nt, Artificial Sequence
  Description of Artificial Sequence: Synthetic oligonucleotide
agcuuauaauuccccaccugc

SEQ ID NO: 2364 - RNA, 21 nt, Artificial Sequence
  Description of Artificial Sequence: Synthetic oligonucleotide
agguggggaauuauaagcuug

SEQ ID NO: 2365 - RNA, 21 nt, Artificial Sequence
  Description of Artificial Sequence: Synthetic oligonucleotide
gcuuauaauuccccaccugcg

SEQ ID NO: 2366 - RNA, 21 nt, Artificial Sequence
  Description of Artificial Sequence: Synthetic oligonucleotide
cagguggggaauuauaagcuu

SEQ ID NO: 2367 - RNA, 21 nt, Artificial Sequence
  Description of Artificial Sequence: Synthetic oligonucleotide
cuuauaauuccccaccugcga

SEQ ID NO: 2368 - RNA, 21 nt, Artificial Sequence
  Description of Artificial Sequence: Synthetic oligonucleotide
gcagguggggaauuauaagcu

SEQ ID NO: 2369 - RNA, 21 nt, Artificial Sequence
  Description of Artificial Sequence: Synthetic oligonucleotide
uuauaauuccccaccugcgau

SEQ ID NO: 2370 - RNA, 21 nt, Artificial Sequence
  Description of Artificial Sequence: Synthetic oligonucleotide
cgcagguggggaauuauaagc

SEQ ID NO: 2371 - RNA, 21 nt, Artificial Sequence
  Description of Artificial Sequence: Synthetic oligonucleotide
uauaauuccccaccugcgaua

SEQ ID NO: 2372 - RNA, 21 nt, Artificial Sequence
  Description of Artificial Sequence: Synthetic oligonucleotide
ucgcagguggggaauuauaag

SEQ ID NO: 2373 - RNA, 21 nt, Artificial Sequence
  Description of Artificial Sequence: Synthetic oligonucleotide
auaauuccccaccugcgauac

SEQ ID NO: 2374 - RNA, 21 nt, Artificial Sequence
  Description of Artificial Sequence: Synthetic oligonucleotide
aucgcagguggggaauuauaa

SEQ ID NO: 2375 - RNA, 21 nt, Artificial Sequence
  Description of Artificial Sequence: Synthetic oligonucleotide
uaauuccccaccugcgauaca

SEQ ID NO: 2376 - RNA, 21 nt, Artificial Sequence
  Description of Artificial Sequence: Synthetic oligonucleotide
uaucgcagguggggaauuaua

SEQ ID NO: 2377 - RNA, 21 nt, Artificial Sequence
  Description of Artificial Sequence: Synthetic oligonucleotide
aauuccccaccugcgauacac

SEQ ID NO: 2378 - RNA, 21 nt, Artificial Sequence
  Description of Artificial Sequence: Synthetic oligonucleotide
guaucgcagguggggaauuau

SEQ ID NO: 2379 - RNA, 21 nt, Artificial Sequence
  Description of Artificial Sequence: Synthetic oligonucleotide
auuccccaccugcgauacacc

SEQ ID NO: 2380 - RNA, 21 nt, Artificial Sequence
  Description of Artificial Sequence: Synthetic oligonucleotide
uguaucgcagguggggaauua

SEQ ID NO: 2381 - RNA, 21 nt, Artificial Sequence
  Description of Artificial Sequence: Synthetic oligonucleotide
uuccccaccugcgauacaccc

SEQ ID NO: 2382 - RNA, 21 nt, Artificial Sequence
  Description of Artificial Sequence: Synthetic oligonucleotide
guguaucgcagguggggaauu

SEQ ID NO: 2383 - RNA, 21 nt, Artificial Sequence
  Description of Artificial Sequence: Synthetic oligonucleotide
uccccaccugcgauacacccu

SEQ ID NO: 2384 - RNA, 21 nt, Artificial Sequence
  Description of Artificial Sequence: Synthetic oligonucleotide
gguguaucgcagguggggaau

SEQ ID NO: 2385 - RNA, 21 nt, Artificial Sequence
  Description of Artificial Sequence: Synthetic oligonucleotide
ccccaccugcgauacacccug

SEQ ID NO: 2386 - RNA, 21 nt, Artificial Sequence
  Description of Artificial Sequence: Synthetic oligonucleotide
ggguguaucgcagguggggaa

SEQ ID NO: 2387 - RNA, 21 nt, Artificial Sequence
  Description of Artificial Sequence: Synthetic oligonucleotide
cccaccugcgauacacccugg

SEQ ID NO: 2388 - RNA, 21 nt, Artificial Sequence
  Description of Artificial Sequence: Synthetic oligonucleotide
aggguguaucgcaggugggga

SEQ ID NO: 2389 - RNA, 21 nt, Artificial Sequence
  Description of Artificial Sequence: Synthetic oligonucleotide
ccaccugcgauacacccugga

SEQ ID NO: 2390 - RNA, 21 nt, Artificial Sequence
  Description of Artificial Sequence: Synthetic oligonucleotide
caggguguaucgcaggugggg

SEQ ID NO: 2391 - RNA, 21 nt, Artificial Sequence
  Description of Artificial Sequence: Synthetic oligonucleotide
caccugcgauacacccuggaa

SEQ ID NO: 2392 - RNA, 21 nt, Artificial Sequence
  Description of Artificial Sequence: Synthetic oligonucleotide
ccaggguguaucgcagguggg

SEQ ID NO: 2393 - RNA, 21 nt, Artificial Sequence
  Description of Artificial Sequence: Synthetic oligonucleotide
accugcgauacacccuggaaa

SEQ ID NO: 2394 - RNA, 21 nt, Artificial Sequence
  Description of Artificial Sequence: Synthetic oligonucleotide
uccaggguguaucgcaggugg

SEQ ID NO: 2395 - RNA, 21 nt, Artificial Sequence
  Description of Artificial Sequence: Synthetic oligonucleotide
ccugcgauacacccuggaaau

SEQ ID NO: 2396 - RNA, 21 nt, Artificial Sequence
  Description of Artificial Sequence: Synthetic oligonucleotide
uuccaggguguaucgcaggug

SEQ ID NO: 2397 - RNA, 21 nt, Artificial Sequence
  Description of Artificial Sequence: Synthetic oligonucleotide
cugcgauacacccuggaaauu

SEQ ID NO: 2398 - RNA, 21 nt, Artificial Sequence
  Description of Artificial Sequence: Synthetic oligonucleotide
uuuccaggguguaucgcaggu

SEQ ID NO: 2399 - RNA, 21 nt, Artificial Sequence
  Description of Artificial Sequence: Synthetic oligonucleotide
ugcgauacacccuggaaauua

SEQ ID NO: 2400 - RNA, 21 nt, Artificial Sequence
  Description of Artificial Sequence: Synthetic oligonucleotide
auuuccaggguguaucgcagg

SEQ ID NO: 2401 - RNA, 21 nt, Artificial Sequence
  Description of Artificial Sequence: Synthetic oligonucleotide
gcgauacacccuggaaauuaa

SEQ ID NO: 2402 - RNA, 21 nt, Artificial Sequence
  Description of Artificial Sequence: Synthetic oligonucleotide
aauuuccaggguguaucgcag

SEQ ID NO: 2403 - RNA, 21 nt, Artificial Sequence
  Description of Artificial Sequence: Synthetic oligonucleotide
cgauacacccuggaaauuaac

SEQ ID NO: 2404 - RNA, 21 nt, Artificial Sequence
  Description of Artificial Sequence: Synthetic oligonucleotide
uaauuuccaggguguaucgca

SEQ ID NO: 2405 - RNA, 21 nt, Artificial Sequence
  Description of Artificial Sequence: Synthetic oligonucleotide
gauacacccuggaaauuaacg

SEQ ID NO: 2406 - RNA, 21 nt, Artificial Sequence
  Description of Artificial Sequence: Synthetic oligonucleotide
uuaauuuccaggguguaucgc

SEQ ID NO: 2407 - RNA, 21 nt, Artificial Sequence
  Description of Artificial Sequence: Synthetic oligonucleotide
auacacccuggaaauuaacgu

SEQ ID NO: 2408 - RNA, 21 nt, Artificial Sequence
  Description of Artificial Sequence: Synthetic oligonucleotide
guuaauuuccaggguguaucg

SEQ ID NO: 2409 - RNA, 21 nt, Artificial Sequence
  Description of Artificial Sequence: Synthetic oligonucleotide
uacacccuggaaauuaacguc

SEQ ID NO: 2410 - RNA, 21 nt, Artificial Sequence
  Description of Artificial Sequence: Synthetic oligonucleotide
cguuaauuuccaggguguauc

SEQ ID NO: 2411 - RNA, 21 nt, Artificial Sequence
  Description of Artificial Sequence: Synthetic oligonucleotide
acacccuggaaauuaacgucc

SEQ ID NO: 2412 - RNA, 21 nt, Artificial Sequence
  Description of Artificial Sequence: Synthetic oligonucleotide
acguuaauuuccaggguguau

SEQ ID NO: 2413 - RNA, 21 nt, Artificial Sequence
  Description of Artificial Sequence: Synthetic oligonucleotide
cacccuggaaauuaacguccg

SEQ ID NO: 2414 - RNA, 21 nt, Artificial Sequence
  Description of Artificial Sequence: Synthetic oligonucleotide
gacguuaauuuccagggugua

SEQ ID NO: 2415 - RNA, 21 nt, Artificial Sequence
  Description of Artificial Sequence: Synthetic oligonucleotide
acccuggaaauuaacguccgg

SEQ ID NO: 2416 - RNA, 21 nt, Artificial Sequence
  Description of Artificial Sequence: Synthetic oligonucleotide
ggacguuaauuuccagggugu

SEQ ID NO: 2417 - RNA, 21 nt, Artificial Sequence
  Description of Artificial Sequence: Synthetic oligonucleotide
cccuggaaauuaacguccggg

SEQ ID NO: 2418 - RNA, 21 nt, Artificial Sequence
  Description of Artificial Sequence: Synthetic oligonucleotide
cggacguuaauuuccagggug

SEQ ID NO: 2419 - RNA, 21 nt, Artificial Sequence
  Description of Artificial Sequence: Synthetic oligonucleotide
ccuggaaauuaacguccgggc

SEQ ID NO: 2420 - RNA, 21 nt, Artificial Sequence
  Description of Artificial Sequence: Synthetic oligonucleotide
ccggacguuaauuuccagggu

SEQ ID NO: 2421 - RNA, 21 nt, Artificial Sequence
  Description of Artificial Sequence: Synthetic oligonucleotide
cuggaaauuaacguccgggcc

SEQ ID NO: 2422 - RNA, 21 nt, Artificial Sequence
  Description of Artificial Sequence: Synthetic oligonucleotide
cccggacguuaauuuccaggg

SEQ ID NO: 2423 - RNA, 21 nt, Artificial Sequence
  Description of Artificial Sequence: Synthetic oligonucleotide
uggaaauuaacguccgggcca

SEQ ID NO: 2424 - RNA, 21 nt, Artificial Sequence
  Description of Artificial Sequence: Synthetic oligonucleotide
gcccggacguuaauuuccagg

SEQ ID NO: 2425 - RNA, 21 nt, Artificial Sequence
  Description of Artificial Sequence: Synthetic oligonucleotide
ggaaauuaacguccgggccag

SEQ ID NO: 2426 - RNA, 21 nt, Artificial Sequence
  Description of Artificial Sequence: Synthetic oligonucleotide
ggcccggacguuaauuuccag

SEQ ID NO: 2427 - RNA, 21 nt, Artificial Sequence
  Description of Artificial Sequence: Synthetic oligonucleotide
gaaauuaacguccgggccagg

SEQ ID NO: 2428 - RNA, 21 nt, Artificial Sequence
  Description of Artificial Sequence: Synthetic oligonucleotide
uggcccggacguuaauuucca

SEQ ID NO: 2429 - RNA, 21 nt, Artificial Sequence
  Description of Artificial Sequence: Synthetic oligonucleotide
aaauuaacguccgggccagga

SEQ ID NO: 2430 - RNA, 21 nt, Artificial Sequence
  Description of Artificial Sequence: Synthetic oligonucleotide
cuggcccggacguuaauuucc

SEQ ID NO: 2431 - RNA, 21 nt, Artificial Sequence
  Description of Artificial Sequence: Synthetic oligonucleotide
aauuaacguccgggccaggac

SEQ ID NO: 2432 - RNA, 21 nt, Artificial Sequence
  Description of Artificial Sequence: Synthetic oligonucleotide
ccuggcccggacguuaauuuc

SEQ ID NO: 2433 - RNA, 21 nt, Artificial Sequence
  Description of Artificial Sequence: Synthetic oligonucleotide
auuaacguccgggccaggacu

SEQ ID NO: 2434 - RNA, 21 nt, Artificial Sequence
  Description of Artificial Sequence: Synthetic oligonucleotide
uccuggcccggacguuaauuu

SEQ ID NO: 2435 - RNA, 21 nt, Artificial Sequence
  Description of Artificial Sequence: Synthetic oligonucleotide
uuaacguccgggccaggacug

SEQ ID NO: 2436 - RNA, 21 nt, Artificial Sequence
  Description of Artificial Sequence: Synthetic oligonucleotide
guccuggcccggacguuaauu

SEQ ID NO: 2437 - RNA, 21 nt, Artificial Sequence
  Description of Artificial Sequence: Synthetic oligonucleotide
uaacguccgggccaggacugg

SEQ ID NO: 2438 - RNA, 21 nt, Artificial Sequence
  Description of Artificial Sequence: Synthetic oligonucleotide
aguccuggcccggacguuaau

SEQ ID NO: 2439 - RNA, 21 nt, Artificial Sequence
  Description of Artificial Sequence: Synthetic oligonucleotide
aacguccgggccaggacuggg

SEQ ID NO: 2440 - RNA, 21 nt, Artificial Sequence
  Description of Artificial Sequence: Synthetic oligonucleotide
caguccuggcccggacguuaa

SEQ ID NO: 2441 - RNA, 21 nt, Artificial Sequence
  Description of Artificial Sequence: Synthetic oligonucleotide
acguccgggccaggacugggc

SEQ ID NO: 2442 - RNA, 21 nt, Artificial Sequence
  Description of Artificial Sequence: Synthetic oligonucleotide
ccaguccuggcccggacguua

SEQ ID NO: 2443 - RNA, 21 nt, Artificial Sequence
  Description of Artificial Sequence: Synthetic oligonucleotide
cguccgggccaggacugggcu

SEQ ID NO: 2444 - RNA, 21 nt, Artificial Sequence
  Description of Artificial Sequence: Synthetic oligonucleotide
cccaguccuggcccggacguu

SEQ ID NO: 2445 - RNA, 21 nt, Artificial Sequence
  Description of Artificial Sequence: Synthetic oligonucleotide
guccgggccaggacugggcug

SEQ ID NO: 2446 - RNA, 21 nt, Artificial Sequence
  Description of Artificial Sequence: Synthetic oligonucleotide
gcccaguccuggcccggacgu

SEQ ID NO: 2447 - RNA, 21 nt, Artificial Sequence
  Description of Artificial Sequence: Synthetic oligonucleotide
uccgggccaggacugggcugg

SEQ ID NO: 2448 - RNA, 21 nt, Artificial Sequence
  Description of Artificial Sequence: Synthetic oligonucleotide
agcccaguccuggcccggacg

SEQ ID NO: 2449 - RNA, 21 nt, Artificial Sequence
  Description of Artificial Sequence: Synthetic oligonucleotide
ccgggccaggacugggcuggu

SEQ ID NO: 2450 - RNA, 21 nt, Artificial Sequence
  Description of Artificial Sequence: Synthetic oligonucleotide
cagcccaguccuggcccggac

SEQ ID NO: 2451 - RNA, 21 nt, Artificial Sequence
  Description of Artificial Sequence: Synthetic oligonucleotide
cgggccaggacugggcugguc

SEQ ID NO: 2452 - RNA, 21 nt, Artificial Sequence
  Description of Artificial Sequence: Synthetic oligonucleotide
ccagcccaguccuggcccgga

SEQ ID NO: 2453 - RNA, 21 nt, Artificial Sequence
  Description of Artificial Sequence: Synthetic oligonucleotide
gggccaggacugggcuggucu

SEQ ID NO: 2454 - RNA, 21 nt, Artificial Sequence
  Description of Artificial Sequence: Synthetic oligonucleotide
accagcccaguccuggcccgg

SEQ ID NO: 2455 - RNA, 21 nt, Artificial Sequence
  Description of Artificial Sequence: Synthetic oligonucleotide
ggccaggacugggcuggucuc

SEQ ID NO: 2456 - RNA, 21 nt, Artificial Sequence
  Description of Artificial Sequence: Synthetic oligonucleotide
gaccagcccaguccuggcccg

SEQ ID NO: 2457 - RNA, 21 nt, Artificial Sequence
  Description of Artificial Sequence: Synthetic oligonucleotide
gccaggacugggcuggucucu

SEQ ID NO: 2458 - RNA, 21 nt, Artificial Sequence
  Description of Artificial Sequence: Synthetic oligonucleotide
agaccagcccaguccuggccc

SEQ ID NO: 2459 - RNA, 21 nt, Artificial Sequence
  Description of Artificial Sequence: Synthetic oligonucleotide
ccaggacugggcuggucucug

SEQ ID NO: 2460 - RNA, 21 nt, Artificial Sequence
  Description of Artificial Sequence: Synthetic oligonucleotide
gagaccagcccaguccuggcc

SEQ ID NO: 2461 - RNA, 21 nt, Artificial Sequence
  Description of Artificial Sequence: Synthetic oligonucleotide
caggacugggcuggucucuga

SEQ ID NO: 2462 - RNA, 21 nt, Artificial Sequence
  Description of Artificial Sequence: Synthetic oligonucleotide
agagaccagcccaguccuggc

SEQ ID NO: 2463 - RNA, 21 nt, Artificial Sequence
  Description of Artificial Sequence: Synthetic oligonucleotide
aggacugggcuggucucugac

SEQ ID NO: 2464 - RNA, 21 nt, Artificial Sequence
  Description of Artificial Sequence: Synthetic oligonucleotide
cagagaccagcccaguccugg

SEQ ID NO: 2465 - RNA, 21 nt, Artificial Sequence
  Description of Artificial Sequence: Synthetic oligonucleotide
ggacugggcuggucucugaca

SEQ ID NO: 2466 - RNA, 21 nt, Artificial Sequence
  Description of Artificial Sequence: Synthetic oligonucleotide
ucagagaccagcccaguccug

SEQ ID NO: 2467 - RNA, 21 nt, Artificial Sequence
  Description of Artificial Sequence: Synthetic oligonucleotide
gacugggcuggucucugacau

SEQ ID NO: 2468 - RNA, 21 nt, Artificial Sequence
  Description of Artificial Sequence: Synthetic oligonucleotide
gucagagaccagcccaguccu

SEQ ID NO: 2469 - RNA, 21 nt, Artificial Sequence
  Description of Artificial Sequence: Synthetic oligonucleotide
acugggcuggucucugacaug

SEQ ID NO: 2470 - RNA, 21 nt, Artificial Sequence
  Description of Artificial Sequence: Synthetic oligonucleotide
ugucagagaccagcccagucc

SEQ ID NO: 2471 - RNA, 21 nt, Artificial Sequence
  Description of Artificial Sequence: Synthetic oligonucleotide
cugggcuggucucugacaugg

SEQ ID NO: 2472 - RNA, 21 nt, Artificial Sequence
  Description of Artificial Sequence: Synthetic oligonucleotide
augucagagaccagcccaguc

SEQ ID NO: 2473 - RNA, 21 nt, Artificial Sequence
  Description of Artificial Sequence: Synthetic oligonucleotide
ugggcuggucucugacauggg

SEQ ID NO: 2474 - RNA, 21 nt, Artificial Sequence
  Description of Artificial Sequence: Synthetic oligonucleotide
caugucagagaccagcccagu

SEQ ID NO: 2475 - RNA, 21 nt, Artificial Sequence
  Description of Artificial Sequence: Synthetic oligonucleotide
gggcuggucucugacauggga

SEQ ID NO: 2476 - RNA, 21 nt, Artificial Sequence
  Description of Artificial Sequence: Synthetic oligonucleotide
ccaugucagagaccagcccag

SEQ ID NO: 2477 - RNA, 21 nt, Artificial Sequence
  Description of Artificial Sequence: Synthetic oligonucleotide
ggcuggucucugacaugggaa

SEQ ID NO: 2478 - RNA, 21 nt, Artificial Sequence
  Description of Artificial Sequence: Synthetic oligonucleotide
cccaugucagagaccagccca

SEQ ID NO: 2479 - RNA, 21 nt, Artificial Sequence
  Description of Artificial Sequence: Synthetic oligonucleotide
gcuggucucugacaugggaau

SEQ ID NO: 2480 - RNA, 21 nt, Artificial Sequence
  Description of Artificial Sequence: Synthetic oligonucleotide
ucccaugucagagaccagccc

SEQ ID NO: 2481 - RNA, 21 nt, Artificial Sequence
  Description of Artificial Sequence: Synthetic oligonucleotide
cuggucucugacaugggaauu

SEQ ID NO: 2482 - RNA, 21 nt, Artificial Sequence
  Description of Artificial Sequence: Synthetic oligonucleotide
uucccaugucagagaccagcc

SEQ ID NO: 2483 - RNA, 21 nt, Artificial Sequence
  Description of Artificial Sequence: Synthetic oligonucleotide
uggucucugacaugggaauuu

SEQ ID NO: 2484 - RNA, 21 nt, Artificial Sequence
  Description of Artificial Sequence: Synthetic oligonucleotide
auucccaugucagagaccagc

SEQ ID NO: 2485 - RNA, 21 nt, Artificial Sequence
  Description of Artificial Sequence: Synthetic oligonucleotide
ggucucugacaugggaauuuu

SEQ ID NO: 2486 - RNA, 21 nt, Artificial Sequence
  Description of Artificial Sequence: Synthetic oligonucleotide
aauucccaugucagagaccag

SEQ ID NO: 2487 - RNA, 21 nt, Artificial Sequence
  Description of Artificial Sequence: Synthetic oligonucleotide
gucucugacaugggaauuuuc

SEQ ID NO: 2488 - RNA, 21 nt, Artificial Sequence
  Description of Artificial Sequence: Synthetic oligonucleotide
aaauucccaugucagagacca

SEQ ID NO: 2489 - RNA, 21 nt, Artificial Sequence
  Description of Artificial Sequence: Synthetic oligonucleotide
ucucugacaugggaauuuucg

SEQ ID NO: 2490 - RNA, 21 nt, Artificial Sequence
  Description of Artificial Sequence: Synthetic oligonucleotide
aaaauucccaugucagagacc

SEQ ID NO: 2491 - RNA, 21 nt, Artificial Sequence
  Description of Artificial Sequence: Synthetic oligonucleotide
cucugacaugggaauuuucga

SEQ ID NO: 2492 - RNA, 21 nt, Artificial Sequence
  Description of Artificial Sequence: Synthetic oligonucleotide
gaaaauucccaugucagagac

SEQ ID NO: 2493 - RNA, 21 nt, Artificial Sequence
  Description of Artificial Sequence: Synthetic oligonucleotide
ucugacaugggaauuuucgac

SEQ ID NO: 2494 - RNA, 21 nt, Artificial Sequence
  Description of Artificial Sequence: Synthetic oligonucleotide
cgaaaauucccaugucagaga

SEQ ID NO: 2495 - RNA, 21 nt, Artificial Sequence
  Description of Artificial Sequence: Synthetic oligonucleotide
cugacaugggaauuuucgacc

SEQ ID NO: 2496 - RNA, 21 nt, Artificial Sequence
  Description of Artificial Sequence: Synthetic oligonucleotide
ucgaaaauucccaugucagag

SEQ ID NO: 2497 - RNA, 21 nt, Artificial Sequence
  Description of Artificial Sequence: Synthetic oligonucleotide
ugacaugggaauuuucgacca

SEQ ID NO: 2498 - RNA, 21 nt, Artificial Sequence
  Description of Artificial Sequence: Synthetic oligonucleotide
gucgaaaauucccaugucaga

SEQ ID NO: 2499 - RNA, 21 nt, Artificial Sequence
  Description of Artificial Sequence: Synthetic oligonucleotide
gacaugggaauuuucgaccag

SEQ ID NO: 2500 - RNA, 21 nt, Artificial Sequence
  Description of Artificial Sequence: Synthetic oligonucleotide
ggucgaaaauucccaugucag

SEQ ID NO: 2501 - RNA, 21 nt, Artificial Sequence
  Description of Artificial Sequence: Synthetic oligonucleotide
acaugggaauuuucgaccaga

SEQ ID NO: 2502 - RNA, 21 nt, Artificial Sequence
  Description of Artificial Sequence: Synthetic oligonucleotide
uggucgaaaauucccauguca

SEQ ID NO: 2503 - RNA, 21 nt, Artificial Sequence
  Description of Artificial Sequence: Synthetic oligonucleotide
caugggaauuuucgaccagau

SEQ ID NO: 2504 - RNA, 21 nt, Artificial Sequence
  Description of Artificial Sequence: Synthetic oligonucleotide
cuggucgaaaauucccauguc

SEQ ID NO: 2505 - RNA, 21 nt, Artificial Sequence
  Description of Artificial Sequence: Synthetic oligonucleotide
augggaauuuucgaccagaua

SEQ ID NO: 2506 - RNA, 21 nt, Artificial Sequence
  Description of Artificial Sequence: Synthetic oligonucleotide
ucuggucgaaaauucccaugu

SEQ ID NO: 2507 - RNA, 21 nt, Artificial Sequence
  Description of Artificial Sequence: Synthetic oligonucleotide
ugggaauuuucgaccagauaa

SEQ ID NO: 2508 - RNA, 21 nt, Artificial Sequence
  Description of Artificial Sequence: Synthetic oligonucleotide
aucuggucgaaaauucccaug

SEQ ID NO: 2509 - RNA, 21 nt, Artificial Sequence
  Description of Artificial Sequence: Synthetic oligonucleotide
gggaauuuucgaccagauaau

SEQ ID NO: 2510 - RNA, 21 nt, Artificial Sequence
  Description of Artificial Sequence: Synthetic oligonucleotide
uaucuggucgaaaauucccau

SEQ ID NO: 2511 - RNA, 21 nt, Artificial Sequence
  Description of Artificial Sequence: Synthetic oligonucleotide
ggaauuuucgaccagauaaug

SEQ ID NO: 2512 - RNA, 21 nt, Artificial Sequence
  Description of Artificial Sequence: Synthetic oligonucleotide
uuaucuggucgaaaauuccca

SEQ ID NO: 2513 - RNA, 21 nt, Artificial Sequence
  Description of Artificial Sequence: Synthetic oligonucleotide
gaauuuucgaccagauaauga

SEQ ID NO: 2514 - RNA, 21 nt, Artificial Sequence
  Description of Artificial Sequence: Synthetic oligonucleotide
auuaucuggucgaaaauuccc

SEQ ID NO: 2515 - RNA, 21 nt, Artificial Sequence
  Description of Artificial Sequence: Synthetic oligonucleotide
aauuuucgaccagauaaugag

SEQ ID NO: 2516 - RNA, 21 nt, Artificial Sequence
  Description of Artificial Sequence: Synthetic oligonucleotide
cauuaucuggucgaaaauucc

SEQ ID NO: 2517 - RNA, 21 nt, Artificial Sequence
  Description of Artificial Sequence: Synthetic oligonucleotide
auuuucgaccagauaaugagc

SEQ ID NO: 2518 - RNA, 21 nt, Artificial Sequence
  Description of Artificial Sequence: Synthetic oligonucleotide
ucauuaucuggucgaaaauuc

SEQ ID NO: 2519 - RNA, 21 nt, Artificial Sequence
  Description of Artificial Sequence: Synthetic oligonucleotide
uuuucgaccagauaaugagca

SEQ ID NO: 2520 - RNA, 21 nt, Artificial Sequence
  Description of Artificial Sequence: Synthetic oligonucleotide
cucauuaucuggucgaaaauu

SEQ ID NO: 2521 - RNA, 21 nt, Artificial Sequence
  Description of Artificial Sequence: Synthetic oligonucleotide
uuucgaccagauaaugagcac

SEQ ID NO: 2522 - RNA, 21 nt, Artificial Sequence
  Description of Artificial Sequence: Synthetic oligonucleotide
gcucauuaucuggucgaaaau

SEQ ID NO: 2523 - RNA, 21 nt, Artificial Sequence
  Description of Artificial Sequence: Synthetic oligonucleotide
uucgaccagauaaugagcacu

SEQ ID NO: 2524 - RNA, 21 nt, Artificial Sequence
  Description of Artificial Sequence: Synthetic oligonucleotide
ugcucauuaucuggucgaaaa

SEQ ID NO: 2525 - RNA, 21 nt, Artificial Sequence
  Description of Artificial Sequence: Synthetic oligonucleotide
ucgaccagauaaugagcacug

SEQ ID NO: 2526 - RNA, 21 nt, Artificial Sequence
  Description of Artificial Sequence: Synthetic oligonucleotide
gugcucauuaucuggucgaaa

SEQ ID NO: 2527 - RNA, 21 nt, Artificial Sequence
  Description of Artificial Sequence: Synthetic oligonucleotide
cgaccagauaaugagcacugg

SEQ ID NO: 2528 - RNA, 21 nt, Artificial Sequence
  Description of Artificial Sequence: Synthetic oligonucleotide
agugcucauuaucuggucgaa

SEQ ID NO: 2529 - RNA, 21 nt, Artificial Sequence
  Description of Artificial Sequence: Synthetic oligonucleotide
gaccagauaaugagcacuggu

SEQ ID NO: 2530 - RNA, 21 nt, Artificial Sequence
  Description of Artificial Sequence: Synthetic oligonucleotide
cagugcucauuaucuggucga

SEQ ID NO: 2531 - RNA, 21 nt, Artificial Sequence
  Description of Artificial Sequence: Synthetic oligonucleotide
accagauaaugagcacuggug

SEQ ID NO: 2532 - RNA, 21 nt, Artificial Sequence
  Description of Artificial Sequence: Synthetic oligonucleotide
ccagugcucauuaucuggucg

SEQ ID NO: 2533 - RNA, 21 nt, Artificial Sequence
  Description of Artificial Sequence: Synthetic oligonucleotide
ccagauaaugagcacuggugg

SEQ ID NO: 2534 - RNA, 21 nt, Artificial Sequence
  Description of Artificial Sequence: Synthetic oligonucleotide
accagugcucauuaucugguc

SEQ ID NO: 2535 - RNA, 21 nt, Artificial Sequence
  Description of Artificial Sequence: Synthetic oligonucleotide
cagauaaugagcacugguggg

SEQ ID NO: 2536 - RNA, 21 nt, Artificial Sequence
  Description of Artificial Sequence: Synthetic oligonucleotide
caccagugcucauuaucuggu

SEQ ID NO: 2537 - RNA, 21 nt, Artificial Sequence
  Description of Artificial Sequence: Synthetic oligonucleotide
agauaaugagcacuggugggg

SEQ ID NO: 2538 - RNA, 21 nt, Artificial Sequence
  Description of Artificial Sequence: Synthetic oligonucleotide
ccaccagugcucauuaucugg

SEQ ID NO: 2539 - RNA, 21 nt, Artificial Sequence
  Description of Artificial Sequence: Synthetic oligonucleotide
gauaaugagcacugguggggg

SEQ ID NO: 2540 - RNA, 21 nt, Artificial Sequence
  Description of Artificial Sequence: Synthetic oligonucleotide
cccaccagugcucauuaucug

SEQ ID NO: 2541 - RNA, 21 nt, Artificial Sequence
  Description of Artificial Sequence: Synthetic oligonucleotide
auaaugagcacugguggggga

SEQ ID NO: 2542 - RNA, 21 nt, Artificial Sequence
  Description of Artificial Sequence: Synthetic oligonucleotide
ccccaccagugcucauuaucu

SEQ ID NO: 2543 - RNA, 21 nt, Artificial Sequence
  Description of Artificial Sequence: Synthetic oligonucleotide
uaaugagcacuggugggggag

SEQ ID NO: 2544 - RNA, 21 nt, Artificial Sequence
  Description of Artificial Sequence: Synthetic oligonucleotide
cccccaccagugcucauuauc

SEQ ID NO: 2545 - RNA, 21 nt, Artificial Sequence
  Description of Artificial Sequence: Synthetic oligonucleotide
aaugagcacuggugggggagg

SEQ ID NO: 2546 - RNA, 21 nt, Artificial Sequence
  Description of Artificial Sequence: Synthetic oligonucleotide
ucccccaccagugcucauuau

SEQ ID NO: 2547 - RNA, 21 nt, Artificial Sequence
  Description of Artificial Sequence: Synthetic oligonucleotide
augagcacuggugggggaggc

SEQ ID NO: 2548 - RNA, 21 nt, Artificial Sequence
  Description of Artificial Sequence: Synthetic oligonucleotide
cucccccaccagugcucauua

SEQ ID NO: 2549 - RNA, 21 nt, Artificial Sequence
  Description of Artificial Sequence: Synthetic oligonucleotide
ugagcacuggugggggaggcc

SEQ ID NO: 2550 - RNA, 21 nt, Artificial Sequence
  Description of Artificial Sequence: Synthetic oligonucleotide
ccucccccaccagugcucauu

SEQ ID NO: 2551 - RNA, 21 nt, Artificial Sequence
  Description of Artificial Sequence: Synthetic oligonucleotide
gagcacuggugggggaggcca

SEQ ID NO: 2552 - RNA, 21 nt, Artificial Sequence
  Description of Artificial Sequence: Synthetic oligonucleotide
gccucccccaccagugcucau

SEQ ID NO: 2553 - RNA, 21 nt, Artificial Sequence
  Description of Artificial Sequence: Synthetic oligonucleotide
agcacuggugggggaggccac

SEQ ID NO: 2554 - RNA, 21 nt, Artificial Sequence
  Description of Artificial Sequence: Synthetic oligonucleotide
ggccucccccaccagugcuca

SEQ ID NO: 2555 - RNA, 21 nt, Artificial Sequence
  Description of Artificial Sequence: Synthetic oligonucleotide
gcacuggugggggaggccacg

SEQ ID NO: 2556 - RNA, 21 nt, Artificial Sequence
  Description of Artificial Sequence: Synthetic oligonucleotide
uggccucccccaccagugcuc

SEQ ID NO: 2557 - RNA, 21 nt, Artificial Sequence
  Description of Artificial Sequence: Synthetic oligonucleotide
cacuggugggggaggccacgu

SEQ ID NO: 2558 - RNA, 21 nt, Artificial Sequence
  Description of Artificial Sequence: Synthetic oligonucleotide
guggccucccccaccagugcu

SEQ ID NO: 2559 - RNA, 21 nt, Artificial Sequence
  Description of Artificial Sequence: Synthetic oligonucleotide
acuggugggggaggccacgug

SEQ ID NO: 2560 - RNA, 21 nt, Artificial Sequence
  Description of Artificial Sequence: Synthetic oligonucleotide
cguggccucccccaccagugc

SEQ ID NO: 2561 - RNA, 21 nt, Artificial Sequence
  Description of Artificial Sequence: Synthetic oligonucleotide
cuggugggggaggccacgugc

SEQ ID NO: 2562 - RNA, 21 nt, Artificial Sequence
  Description of Artificial Sequence: Synthetic oligonucleotide
acguggccucccccaccagug

SEQ ID NO: 2563 - RNA, 21 nt, Artificial Sequence
  Description of Artificial Sequence: Synthetic oligonucleotide
uggugggggaggccacgugca

SEQ ID NO: 2564 - RNA, 21 nt, Artificial Sequence
  Description of Artificial Sequence: Synthetic oligonucleotide
cacguggccucccccaccagu

SEQ ID NO: 2565 - RNA, 21 nt, Artificial Sequence
  Description of Artificial Sequence: Synthetic oligonucleotide
ggugggggaggccacgugcag

SEQ ID NO: 2566 - RNA, 21 nt, Artificial Sequence
  Description of Artificial Sequence: Synthetic oligonucleotide
gcacguggccucccccaccag

SEQ ID NO: 2567 - RNA, 21 nt, Artificial Sequence
  Description of Artificial Sequence: Synthetic oligonucleotide
gugggggaggccacgugcagc

SEQ ID NO: 2568 - RNA, 21 nt, Artificial Sequence
  Description of Artificial Sequence: Synthetic oligonucleotide
ugcacguggccucccccacca

SEQ ID NO: 2569 - RNA, 21 nt, Artificial Sequence
  Description of Artificial Sequence: Synthetic oligonucleotide
ugggggaggccacgugcagcu

SEQ ID NO: 2570 - RNA, 21 nt, Artificial Sequence
  Description of Artificial Sequence: Synthetic oligonucleotide
cugcacguggccucccccacc

SEQ ID NO: 2571 - RNA, 21 nt, Artificial Sequence
  Description of Artificial Sequence: Synthetic oligonucleotide
gggggaggccacgugcagcug

SEQ ID NO: 2572 - RNA, 21 nt, Artificial Sequence
  Description of Artificial Sequence: Synthetic oligonucleotide
gcugcacguggccucccccac

SEQ ID NO: 2573 - RNA, 21 nt, Artificial Sequence
  Description of Artificial Sequence: Synthetic oligonucleotide
ggggaggccacgugcagcugc

SEQ ID NO: 2574 - RNA, 21 nt, Artificial Sequence
  Description of Artificial Sequence: Synthetic oligonucleotide
agcugcacguggccuccccca

SEQ ID NO: 2575 - RNA, 21 nt, Artificial Sequence
  Description of Artificial Sequence: Synthetic oligonucleotide
gggaggccacgugcagcugcu

SEQ ID NO: 2576 - RNA, 21 nt, Artificial Sequence
  Description of Artificial Sequence: Synthetic oligonucleotide
cagcugcacguggccuccccc

SEQ ID NO: 2577 - RNA, 21 nt, Artificial Sequence
  Description of Artificial Sequence: Synthetic oligonucleotide
ggaggccacgugcagcugcuc

SEQ ID NO: 2578 - RNA, 21 nt, Artificial Sequence
  Description of Artificial Sequence: Synthetic oligonucleotide
gcagcugcacguggccucccc

SEQ ID NO: 2579 - RNA, 21 nt, Artificial Sequence
  Description of Artificial Sequence: Synthetic oligonucleotide
gaggccacgugcagcugcuca

SEQ ID NO: 2580 - RNA, 21 nt, Artificial Sequence
  Description of Artificial Sequence: Synthetic oligonucleotide
agcagcugcacguggccuccc

SEQ ID NO: 2581 - RNA, 21 nt, Artificial Sequence
  Description of Artificial Sequence: Synthetic oligonucleotide
aggccacgugcagcugcucaa

SEQ ID NO: 2582 - RNA, 21 nt, Artificial Sequence
  Description of Artificial Sequence: Synthetic oligonucleotide
gagcagcugcacguggccucc

SEQ ID NO: 2583 - RNA, 21 nt, Artificial Sequence
  Description of Artificial Sequence: Synthetic oligonucleotide
ggccacgugcagcugcucaag

SEQ ID NO: 2584 - RNA, 21 nt, Artificial Sequence
  Description of Artificial Sequence: Synthetic oligonucleotide
ugagcagcugcacguggccuc

SEQ ID NO: 2585 - RNA, 21 nt, Artificial Sequence
  Description of Artificial Sequence: Synthetic oligonucleotide
gccacgugcagcugcucaagc

SEQ ID NO: 2586 - RNA, 21 nt, Artificial Sequence
  Description of Artificial Sequence: Synthetic oligonucleotide
uugagcagcugcacguggccu

SEQ ID NO: 2587 - RNA, 21 nt, Artificial Sequence
  Description of Artificial Sequence: Synthetic oligonucleotide
ccacgugcagcugcucaagca

SEQ ID NO: 2588 - RNA, 21 nt, Artificial Sequence
  Description of Artificial Sequence: Synthetic oligonucleotide
cuugagcagcugcacguggcc

SEQ ID NO: 2589 - RNA, 21 nt, Artificial Sequence
  Description of Artificial Sequence: Synthetic oligonucleotide
cacgugcagcugcucaagcaa

SEQ ID NO: 2590 - RNA, 21 nt, Artificial Sequence
  Description of Artificial Sequence: Synthetic oligonucleotide
gcuugagcagcugcacguggc

SEQ ID NO: 2591 - RNA, 21 nt, Artificial Sequence
  Description of Artificial Sequence: Synthetic oligonucleotide
acgugcagcugcucaagcaag

SEQ ID NO: 2592 - RNA, 21 nt, Artificial Sequence
  Description of Artificial Sequence: Synthetic oligonucleotide
ugcuugagcagcugcacgugg

SEQ ID NO: 2593 - RNA, 21 nt, Artificial Sequence
  Description of Artificial Sequence: Synthetic oligonucleotide
cgugcagcugcucaagcaagc

SEQ ID NO: 2594 - RNA, 21 nt, Artificial Sequence
  Description of Artificial Sequence: Synthetic oligonucleotide
uugcuugagcagcugcacgug

SEQ ID NO: 2595 - RNA, 21 nt, Artificial Sequence
  Description of Artificial Sequence: Synthetic oligonucleotide
gugcagcugcucaagcaagcu

SEQ ID NO: 2596 - RNA, 21 nt, Artificial Sequence
  Description of Artificial Sequence: Synthetic oligonucleotide
cuugcuugagcagcugcacgu

SEQ ID NO: 2597 - RNA, 21 nt, Artificial Sequence
  Description of Artificial Sequence: Synthetic oligonucleotide
ugcagcugcucaagcaagcug

SEQ ID NO: 2598 - RNA, 21 nt, Artificial Sequence
  Description of Artificial Sequence: Synthetic oligonucleotide
gcuugcuugagcagcugcacg

SEQ ID NO: 2599 - RNA, 21 nt, Artificial Sequence
  Description of Artificial Sequence: Synthetic oligonucleotide
gcagcugcucaagcaagcugg

SEQ ID NO: 2600 - RNA, 21 nt, Artificial Sequence
  Description of Artificial Sequence: Synthetic oligonucleotide
agcuugcuugagcagcugcac

SEQ ID NO: 2601 - RNA, 21 nt, Artificial Sequence
  Description of Artificial Sequence: Synthetic oligonucleotide
cagcugcucaagcaagcugga

SEQ ID NO: 2602 - RNA, 21 nt, Artificial Sequence
  Description of Artificial Sequence: Synthetic oligonucleotide
cagcuugcuugagcagcugca

SEQ ID NO: 2603 - RNA, 21 nt, Artificial Sequence
  Description of Artificial Sequence: Synthetic oligonucleotide
agcugcucaagcaagcuggag

SEQ ID NO: 2604 - RNA, 21 nt, Artificial Sequence
  Description of Artificial Sequence: Synthetic oligonucleotide
ccagcuugcuugagcagcugc

SEQ ID NO: 2605 - RNA, 21 nt, Artificial Sequence
  Description of Artificial Sequence: Synthetic oligonucleotide
gcugcucaagcaagcuggagc

SEQ ID NO: 2606 - RNA, 21 nt, Artificial Sequence
  Description of Artificial Sequence: Synthetic oligonucleotide
uccagcuugcuugagcagcug

SEQ ID NO: 2607 - RNA, 21 nt, Artificial Sequence
  Description of Artificial Sequence: Synthetic oligonucleotide
cugcucaagcaagcuggagcc

SEQ ID NO: 2608 - RNA, 21 nt, Artificial Sequence
  Description of Artificial Sequence: Synthetic oligonucleotide
cuccagcuugcuugagcagcu

SEQ ID NO: 2609 - RNA, 21 nt, Artificial Sequence
  Description of Artificial Sequence: Synthetic oligonucleotide
ugcucaagcaagcuggagccu

SEQ ID NO: 2610 - RNA, 21 nt, Artificial Sequence
  Description of Artificial Sequence: Synthetic oligonucleotide
gcuccagcuugcuugagcagc

SEQ ID NO: 2611 - RNA, 21 nt, Artificial Sequence
  Description of Artificial Sequence: Synthetic oligonucleotide
gcucaagcaagcuggagccuu

SEQ ID NO: 2612 - RNA, 21 nt, Artificial Sequence
  Description of Artificial Sequence: Synthetic oligonucleotide
ggcuccagcuugcuugagcag

SEQ ID NO: 2613 - RNA, 21 nt, Artificial Sequence
  Description of Artificial Sequence: Synthetic oligonucleotide
cucaagcaagcuggagccuuc

SEQ ID NO: 2614 - RNA, 21 nt, Artificial Sequence
  Description of Artificial Sequence: Synthetic oligonucleotide
aggcuccagcuugcuugagca

SEQ ID NO: 2615 - RNA, 21 nt, Artificial Sequence
  Description of Artificial Sequence: Synthetic oligonucleotide
ucaagcaagcuggagccuucc

SEQ ID NO: 2616 - RNA, 21 nt, Artificial Sequence
  Description of Artificial Sequence: Synthetic oligonucleotide
aaggcuccagcuugcuugagc

SEQ ID NO: 2617 - RNA, 21 nt, Artificial Sequence
  Description of Artificial Sequence: Synthetic oligonucleotide
caagcaagcuggagccuuccu

SEQ ID NO: 2618 - RNA, 21 nt, Artificial Sequence
  Description of Artificial Sequence: Synthetic oligonucleotide
gaaggcuccagcuugcuugag

SEQ ID NO: 2619 - RNA, 21 nt, Artificial Sequence
  Description of Artificial Sequence: Synthetic oligonucleotide
aagcaagcuggagccuuccua

SEQ ID NO: 2620 - RNA, 21 nt, Artificial Sequence
  Description of Artificial Sequence: Synthetic oligonucleotide
ggaaggcuccagcuugcuuga

SEQ ID NO: 2621 - RNA, 21 nt, Artificial Sequence
  Description of Artificial Sequence: Synthetic oligonucleotide
agcaagcuggagccuuccuaa

SEQ ID NO: 2622 - RNA, 21 nt, Artificial Sequence
  Description of Artificial Sequence: Synthetic oligonucleotide
aggaaggcuccagcuugcuug

SEQ ID NO: 2623 - RNA, 21 nt, Artificial Sequence
  Description of Artificial Sequence: Synthetic oligonucleotide
gcaagcuggagccuuccuaac

SEQ ID NO: 2624 - RNA, 21 nt, Artificial Sequence
  Description of Artificial Sequence: Synthetic oligonucleotide
uaggaaggcuccagcuugcuu

SEQ ID NO: 2625 - RNA, 21 nt, Artificial Sequence
  Description of Artificial Sequence: Synthetic oligonucleotide
caagcuggagccuuccuaacc

SEQ ID NO: 2626 - RNA, 21 nt, Artificial Sequence
  Description of Artificial Sequence: Synthetic oligonucleotide
uuaggaaggcuccagcuugcu

SEQ ID NO: 2627 - RNA, 21 nt, Artificial Sequence
  Description of Artificial Sequence: Synthetic oligonucleotide
aagcuggagccuuccuaaccu

SEQ ID NO: 2628 - RNA, 21 nt, Artificial Sequence
  Description of Artificial Sequence: Synthetic oligonucleotide
guuaggaaggcuccagcuugc

SEQ ID NO: 2629 - RNA, 21 nt, Artificial Sequence
  Description of Artificial Sequence: Synthetic oligonucleotide
agcuggagccuuccuaaccua

SEQ ID NO: 2630 - RNA, 21 nt, Artificial Sequence
  Description of Artificial Sequence: Synthetic oligonucleotide
gguuaggaaggcuccagcuug

SEQ ID NO: 2631 - RNA, 21 nt, Artificial Sequence
  Description of Artificial Sequence: Synthetic oligonucleotide
gcuggagccuuccuaaccuac

SEQ ID NO: 2632 - RNA, 21 nt, Artificial Sequence
  Description of Artificial Sequence: Synthetic oligonucleotide
agguuaggaaggcuccagcuu

SEQ ID NO: 2633 - RNA, 21 nt, Artificial Sequence
  Description of Artificial Sequence: Synthetic oligonucleotide
cuggagccuuccuaaccuaca

SEQ ID NO: 2634 - RNA, 21 nt, Artificial Sequence
  Description of Artificial Sequence: Synthetic oligonucleotide
uagguuaggaaggcuccagcu

SEQ ID NO: 2635 - RNA, 21 nt, Artificial Sequence
  Description of Artificial Sequence: Synthetic oligonucleotide
uggagccuuccuaaccuacag

SEQ ID NO: 2636 - RNA, 21 nt, Artificial Sequence
  Description of Artificial Sequence: Synthetic oligonucleotide
guagguuaggaaggcuccagc

SEQ ID NO: 2637 - RNA, 21 nt, Artificial Sequence
  Description of Artificial Sequence: Synthetic oligonucleotide
ggagccuuccuaaccuacagc

SEQ ID NO: 2638 - RNA, 21 nt, Artificial Sequence
  Description of Artificial Sequence: Synthetic oligonucleotide
uguagguuaggaaggcuccag

SEQ ID NO: 2639 - RNA, 21 nt, Artificial Sequence
  Description of Artificial Sequence: Synthetic oligonucleotide
gagccuuccuaaccuacagcu

SEQ ID NO: 2640 - RNA, 21 nt, Artificial Sequence
  Description of Artificial Sequence: Synthetic oligonucleotide
cuguagguuaggaaggcucca

SEQ ID NO: 2641 - RNA, 21 nt, Artificial Sequence
  Description of Artificial Sequence: Synthetic oligonucleotide
agccuuccuaaccuacagcuc

SEQ ID NO: 2642 - RNA, 21 nt, Artificial Sequence
  Description of Artificial Sequence: Synthetic oligonucleotide
gcuguagguuaggaaggcucc

SEQ ID NO: 2643 - RNA, 21 nt, Artificial Sequence
  Description of Artificial Sequence: Synthetic oligonucleotide
gccuuccuaaccuacagcucc

SEQ ID NO: 2644 - RNA, 21 nt, Artificial Sequence
  Description of Artificial Sequence: Synthetic oligonucleotide
agcuguagguuaggaaggcuc

SEQ ID NO: 2645 - RNA, 21 nt, Artificial Sequence
  Description of Artificial Sequence: Synthetic oligonucleotide
ccuuccuaaccuacagcuccu

SEQ ID NO: 2646 - RNA, 21 nt, Artificial Sequence
  Description of Artificial Sequence: Synthetic oligonucleotide
gagcuguagguuaggaaggcu

SEQ ID NO: 2647 - RNA, 21 nt, Artificial Sequence
  Description of Artificial Sequence: Synthetic oligonucleotide
cuuccuaaccuacagcuccuu

SEQ ID NO: 2648 - RNA, 21 nt, Artificial Sequence
  Description of Artificial Sequence: Synthetic oligonucleotide
ggagcuguagguuaggaaggc

SEQ ID NO: 2649 - RNA, 21 nt, Artificial Sequence
  Description of Artificial Sequence: Synthetic oligonucleotide
uuccuaaccuacagcuccuuc

SEQ ID NO: 2650 - RNA, 21 nt, Artificial Sequence
  Description of Artificial Sequence: Synthetic oligonucleotide
aggagcuguagguuaggaagg

SEQ ID NO: 2651 - RNA, 21 nt, Artificial Sequence
  Description of Artificial Sequence: Synthetic oligonucleotide
uccuaaccuacagcuccuucu

SEQ ID NO: 2652 - RNA, 21 nt, Artificial Sequence
  Description of Artificial Sequence: Synthetic oligonucleotide
aaggagcuguagguuaggaag

SEQ ID NO: 2653 - RNA, 21 nt, Artificial Sequence
  Description of Artificial Sequence: Synthetic oligonucleotide
ccuaaccuacagcuccuucug

SEQ ID NO: 2654 - RNA, 21 nt, Artificial Sequence
  Description of Artificial Sequence: Synthetic oligonucleotide
gaaggagcuguagguuaggaa

SEQ ID NO: 2655 - RNA, 21 nt, Artificial Sequence
  Description of Artificial Sequence: Synthetic oligonucleotide
cuaaccuacagcuccuucugu

SEQ ID NO: 2656 - RNA, 21 nt, Artificial Sequence
  Description of Artificial Sequence: Synthetic oligonucleotide
agaaggagcuguagguuagga

SEQ ID NO: 2657 - RNA, 21 nt, Artificial Sequence
  Description of Artificial Sequence: Synthetic oligonucleotide
uaaccuacagcuccuucuguc

SEQ ID NO: 2658 - RNA, 21 nt, Artificial Sequence
  Description of Artificial Sequence: Synthetic oligonucleotide
cagaaggagcuguagguuagg

SEQ ID NO: 2659 - RNA, 21 nt, Artificial Sequence
  Description of Artificial Sequence: Synthetic oligonucleotide
aaccuacagcuccuucugucc

SEQ ID NO: 2660 - RNA, 21 nt, Artificial Sequence
  Description of Artificial Sequence: Synthetic oligonucleotide
acagaaggagcuguagguuag

SEQ ID NO: 2661 - RNA, 21 nt, Artificial Sequence
  Description of Artificial Sequence: Synthetic oligonucleotide
accuacagcuccuucuguccc

SEQ ID NO: 2662 - RNA, 21 nt, Artificial Sequence
  Description of Artificial Sequence: Synthetic oligonucleotide
gacagaaggagcuguagguua

SEQ ID NO: 2663 - RNA, 21 nt, Artificial Sequence
  Description of Artificial Sequence: Synthetic oligonucleotide
ccuacagcuccuucugucccc

SEQ ID NO: 2664 - RNA, 21 nt, Artificial Sequence
  Description of Artificial Sequence: Synthetic oligonucleotide
ggacagaaggagcuguagguu

SEQ ID NO: 2665 - RNA, 21 nt, Artificial Sequence
  Description of Artificial Sequence: Synthetic oligonucleotide
cuacagcuccuucuguccccc

SEQ ID NO: 2666 - RNA, 21 nt, Artificial Sequence
  Description of Artificial Sequence: Synthetic oligonucleotide
gggacagaaggagcuguaggu

SEQ ID NO: 2667 - RNA, 21 nt, Artificial Sequence
  Description of Artificial Sequence: Synthetic oligonucleotide
uacagcuccuucugucccccu

SEQ ID NO: 2668 - RNA, 21 nt, Artificial Sequence
  Description of Artificial Sequence: Synthetic oligonucleotide
ggggacagaaggagcuguagg

SEQ ID NO: 2669 - RNA, 21 nt, Artificial Sequence
  Description of Artificial Sequence: Synthetic oligonucleotide
acagcuccuucugucccccug

SEQ ID NO: 2670 - RNA, 21 nt, Artificial Sequence
  Description of Artificial Sequence: Synthetic oligonucleotide
gggggacagaaggagcuguag

SEQ ID NO: 2671 - RNA, 21 nt, Artificial Sequence
  Description of Artificial Sequence: Synthetic oligonucleotide
cagcuccuucugucccccuga

SEQ ID NO: 2672 - RNA, 21 nt, Artificial Sequence
  Description of Artificial Sequence: Synthetic oligonucleotide
agggggacagaaggagcugua

SEQ ID NO: 2673 - RNA, 21 nt, Artificial Sequence
  Description of Artificial Sequence: Synthetic oligonucleotide
agcuccuucugucccccugau

SEQ ID NO: 2674 - RNA, 21 nt, Artificial Sequence
  Description of Artificial Sequence: Synthetic oligonucleotide
cagggggacagaaggagcugu

SEQ ID NO: 2675 - RNA, 21 nt, Artificial Sequence
  Description of Artificial Sequence: Synthetic oligonucleotide
gcuccuucugucccccugaug

SEQ ID NO: 2676 - RNA, 21 nt, Artificial Sequence
  Description of Artificial Sequence: Synthetic oligonucleotide
ucagggggacagaaggagcug

SEQ ID NO: 2677 - RNA, 21 nt, Artificial Sequence
  Description of Artificial Sequence: Synthetic oligonucleotide
cuccuucugucccccugauga

SEQ ID NO: 2678 - RNA, 21 nt, Artificial Sequence
  Description of Artificial Sequence: Synthetic oligonucleotide
aucagggggacagaaggagcu

SEQ ID NO: 2679 - RNA, 21 nt, Artificial Sequence
  Description of Artificial Sequence: Synthetic oligonucleotide
uccuucugucccccugaugac

SEQ ID NO: 2680 - RNA, 21 nt, Artificial Sequence
  Description of Artificial Sequence: Synthetic oligonucleotide
caucagggggacagaaggagc

SEQ ID NO: 2681 - RNA, 21 nt, Artificial Sequence
  Description of Artificial Sequence: Synthetic oligonucleotide
ccuucugucccccugaugacu

SEQ ID NO: 2682 - RNA, 21 nt, Artificial Sequence
  Description of Artificial Sequence: Synthetic oligonucleotide
ucaucagggggacagaaggag

SEQ ID NO: 2683 - RNA, 21 nt, Artificial Sequence
  Description of Artificial Sequence: Synthetic oligonucleotide
cuucugucccccugaugacuu

SEQ ID NO: 2684 - RNA, 21 nt, Artificial Sequence
  Description of Artificial Sequence: Synthetic oligonucleotide
gucaucagggggacagaagga

SEQ ID NO: 2685 - RNA, 21 nt, Artificial Sequence
  Description of Artificial Sequence: Synthetic oligonucleotide
uucugucccccugaugacuug

SEQ ID NO: 2686 - RNA, 21 nt, Artificial Sequence
  Description of Artificial Sequence: Synthetic oligonucleotide
agucaucagggggacagaagg

SEQ ID NO: 2687 - RNA, 21 nt, Artificial Sequence
  Description of Artificial Sequence: Synthetic oligonucleotide
ucugucccccugaugacuugg

SEQ ID NO: 2688 - RNA, 21 nt, Artificial Sequence
  Description of Artificial Sequence: Synthetic oligonucleotide
aagucaucagggggacagaag

SEQ ID NO: 2689 - RNA, 21 nt, Artificial Sequence
  Description of Artificial Sequence: Synthetic oligonucleotide
cugucccccugaugacuuggc

SEQ ID NO: 2690 - RNA, 21 nt, Artificial Sequence
  Description of Artificial Sequence: Synthetic oligonucleotide
caagucaucagggggacagaa

SEQ ID NO: 2691 - RNA, 21 nt, Artificial Sequence
  Description of Artificial Sequence: Synthetic oligonucleotide
ugucccccugaugacuuggcc

SEQ ID NO: 2692 - RNA, 21 nt, Artificial Sequence
  Description of Artificial Sequence: Synthetic oligonucleotide
ccaagucaucagggggacaga

SEQ ID NO: 2693 - RNA, 21 nt, Artificial Sequence
  Description of Artificial Sequence: Synthetic oligonucleotide
gucccccugaugacuuggccg

SEQ ID NO: 2694 - RNA, 21 nt, Artificial Sequence
  Description of Artificial Sequence: Synthetic oligonucleotide
gccaagucaucagggggacag

SEQ ID NO: 2695 - RNA, 21 nt, Artificial Sequence
  Description of Artificial Sequence: Synthetic oligonucleotide
ucccccugaugacuuggccga

SEQ ID NO: 2696 - RNA, 21 nt, Artificial Sequence
  Description of Artificial Sequence: Synthetic oligonucleotide
ggccaagucaucagggggaca

SEQ ID NO: 2697 - RNA, 21 nt, Artificial Sequence
  Description of Artificial Sequence: Synthetic oligonucleotide
cccccugaugacuuggccgac

SEQ ID NO: 2698 - RNA, 21 nt, Artificial Sequence
  Description of Artificial Sequence: Synthetic oligonucleotide
cggccaagucaucagggggac

SEQ ID NO: 2699 - RNA, 21 nt, Artificial Sequence
  Description of Artificial Sequence: Synthetic oligonucleotide
ccccugaugacuuggccgacc

SEQ ID NO: 2700 - RNA, 21 nt, Artificial Sequence
  Description of Artificial Sequence: Synthetic oligonucleotide
ucggccaagucaucaggggga

SEQ ID NO: 2701 - RNA, 21 nt, Artificial Sequence
  Description of Artificial Sequence: Synthetic oligonucleotide
cccugaugacuuggccgaccg

SEQ ID NO: 2702 - RNA, 21 nt, Artificial Sequence
  Description of Artificial Sequence: Synthetic oligonucleotide
gucggccaagucaucaggggg

SEQ ID NO: 2703 - RNA, 21 nt, Artificial Sequence
  Description of Artificial Sequence: Synthetic oligonucleotide
ccugaugacuuggccgaccgg

SEQ ID NO: 2704 - RNA, 21 nt, Artificial Sequence
  Description of Artificial Sequence: Synthetic oligonucleotide
ggucggccaagucaucagggg

SEQ ID NO: 2705 - RNA, 21 nt, Artificial Sequence
  Description of Artificial Sequence: Synthetic oligonucleotide
cugaugacuuggccgaccggg

SEQ ID NO: 2706 - RNA, 21 nt, Artificial Sequence
  Description of Artificial Sequence: Synthetic oligonucleotide
cggucggccaagucaucaggg

SEQ ID NO: 2707 - RNA, 21 nt, Artificial Sequence
  Description of Artificial Sequence: Synthetic oligonucleotide
ugaugacuuggccgaccgggg

SEQ ID NO: 2708 - RNA, 21 nt, Artificial Sequence
  Description of Artificial Sequence: Synthetic oligonucleotide
ccggucggccaagucaucagg

SEQ ID NO: 2709 - RNA, 21 nt, Artificial Sequence
  Description of Artificial Sequence: Synthetic oligonucleotide
gaugacuuggccgaccggggg

SEQ ID NO: 2710 - RNA, 21 nt, Artificial Sequence
  Description of Artificial Sequence: Synthetic oligonucleotide
cccggucggccaagucaucag

SEQ ID NO: 2711 - RNA, 21 nt, Artificial Sequence
  Description of Artificial Sequence: Synthetic oligonucleotide
augacuuggccgaccgggggc

SEQ ID NO: 2712 - RNA, 21 nt, Artificial Sequence
  Description of Artificial Sequence: Synthetic oligonucleotide
ccccggucggccaagucauca

SEQ ID NO: 2713 - RNA, 21 nt, Artificial Sequence
  Description of Artificial Sequence: Synthetic oligonucleotide
ugacuuggccgaccgggggcu

SEQ ID NO: 2714 - RNA, 21 nt, Artificial Sequence
  Description of Artificial Sequence: Synthetic oligonucleotide
cccccggucggccaagucauc

SEQ ID NO: 2715 - RNA, 21 nt, Artificial Sequence
  Description of Artificial Sequence: Synthetic oligonucleotide
gacuuggccgaccgggggcuc

SEQ ID NO: 2716 - RNA, 21 nt, Artificial Sequence
  Description of Artificial Sequence: Synthetic oligonucleotide
gcccccggucggccaagucau

SEQ ID NO: 2717 - RNA, 21 nt, Artificial Sequence
  Description of Artificial Sequence: Synthetic oligonucleotide
acuuggccgaccgggggcucc

SEQ ID NO: 2718 - RNA, 21 nt, Artificial Sequence
  Description of Artificial Sequence: Synthetic oligonucleotide
agcccccggucggccaaguca

SEQ ID NO: 2719 - RNA, 21 nt, Artificial Sequence
  Description of Artificial Sequence: Synthetic oligonucleotide
cuuggccgaccgggggcuccu

SEQ ID NO: 2720 - RNA, 21 nt, Artificial Sequence
  Description of Artificial Sequence: Synthetic oligonucleotide
gagcccccggucggccaaguc

SEQ ID NO: 2721 - RNA, 21 nt, Artificial Sequence
  Description of Artificial Sequence: Synthetic oligonucleotide
uuggccgaccgggggcuccug

SEQ ID NO: 2722 - RNA, 21 nt, Artificial Sequence
  Description of Artificial Sequence: Synthetic oligonucleotide
ggagcccccggucggccaagu

SEQ ID NO: 2723 - RNA, 21 nt, Artificial Sequence
  Description of Artificial Sequence: Synthetic oligonucleotide
uggccgaccgggggcuccugg

SEQ ID NO: 2724 - RNA, 21 nt, Artificial Sequence
  Description of Artificial Sequence: Synthetic oligonucleotide
aggagcccccggucggccaag

SEQ ID NO: 2725 - RNA, 21 nt, Artificial Sequence
  Description of Artificial Sequence: Synthetic oligonucleotide
ggccgaccgggggcuccuggg

SEQ ID NO: 2726 - RNA, 21 nt, Artificial Sequence
  Description of Artificial Sequence: Synthetic oligonucleotide
caggagcccccggucggccaa

SEQ ID NO: 2727 - RNA, 21 nt, Artificial Sequence
  Description of Artificial Sequence: Synthetic oligonucleotide
gccgaccgggggcuccuggga

SEQ ID NO: 2728 - RNA, 21 nt, Artificial Sequence
  Description of Artificial Sequence: Synthetic oligonucleotide
ccaggagcccccggucggcca

SEQ ID NO: 2729 - RNA, 21 nt, Artificial Sequence
  Description of Artificial Sequence: Synthetic oligonucleotide
ccgaccgggggcuccugggag

SEQ ID NO: 2730 - RNA, 21 nt, Artificial Sequence
  Description of Artificial Sequence: Synthetic oligonucleotide
cccaggagcccccggucggcc

SEQ ID NO: 2731 - RNA, 21 nt, Artificial Sequence
  Description of Artificial Sequence: Synthetic oligonucleotide
cgaccgggggcuccugggagu

SEQ ID NO: 2732 - RNA, 21 nt, Artificial Sequence
  Description of Artificial Sequence: Synthetic oligonucleotide
ucccaggagcccccggucggc

SEQ ID NO: 2733 - RNA, 21 nt, Artificial Sequence
  Description of Artificial Sequence: Synthetic oligonucleotide
gaccgggggcuccugggagug

SEQ ID NO: 2734 - RNA, 21 nt, Artificial Sequence
  Description of Artificial Sequence: Synthetic oligonucleotide
cucccaggagcccccggucgg

SEQ ID NO: 2735 - RNA, 21 nt, Artificial Sequence
  Description of Artificial Sequence: Synthetic oligonucleotide
accgggggcuccugggaguga

SEQ ID NO: 2736 - RNA, 21 nt, Artificial Sequence
  Description of Artificial Sequence: Synthetic oligonucleotide
acucccaggagcccccggucg

SEQ ID NO: 2737 - RNA, 21 nt, Artificial Sequence
  Description of Artificial Sequence: Synthetic oligonucleotide
ccgggggcuccugggagugaa

SEQ ID NO: 2738 - RNA, 21 nt, Artificial Sequence
  Description of Artificial Sequence: Synthetic oligonucleotide
cacucccaggagcccccgguc

SEQ ID NO: 2739 - RNA, 21 nt, Artificial Sequence
  Description of Artificial Sequence: Synthetic oligonucleotide
cgggggcuccugggagugaag

SEQ ID NO: 2740 - RNA, 21 nt, Artificial Sequence
  Description of Artificial Sequence: Synthetic oligonucleotide
ucacucccaggagcccccggu

SEQ ID NO: 2741 - RNA, 21 nt, Artificial Sequence
  Description of Artificial Sequence: Synthetic oligonucleotide
gggggcuccugggagugaagu

SEQ ID NO: 2742 - RNA, 21 nt, Artificial Sequence
  Description of Artificial Sequence: Synthetic oligonucleotide
uucacucccaggagcccccgg

SEQ ID NO: 2743 - RNA, 21 nt, Artificial Sequence
  Description of Artificial Sequence: Synthetic oligonucleotide
ggggcuccugggagugaaguc

SEQ ID NO: 2744 - RNA, 21 nt, Artificial Sequence
  Description of Artificial Sequence: Synthetic oligonucleotide
cuucacucccaggagcccccg

SEQ ID NO: 2745 - RNA, 21 nt, Artificial Sequence
  Description of Artificial Sequence: Synthetic oligonucleotide
gggcuccugggagugaagucu

SEQ ID NO: 2746 - RNA, 21 nt, Artificial Sequence
  Description of Artificial Sequence: Synthetic oligonucleotide
acuucacucccaggagccccc

SEQ ID NO: 2747 - RNA, 21 nt, Artificial Sequence
  Description of Artificial Sequence: Synthetic oligonucleotide
ggcuccugggagugaagucuu

SEQ ID NO: 2748 - RNA, 21 nt, Artificial Sequence
  Description of Artificial Sequence: Synthetic oligonucleotide
gacuucacucccaggagcccc

SEQ ID NO: 2749 - RNA, 21 nt, Artificial Sequence
  Description of Artificial Sequence: Synthetic oligonucleotide
gcuccugggagugaagucuuc

SEQ ID NO: 2750 - RNA, 21 nt, Artificial Sequence
  Description of Artificial Sequence: Synthetic oligonucleotide
agacuucacucccaggagccc

SEQ ID NO: 2751 - RNA, 21 nt, Artificial Sequence
  Description of Artificial Sequence: Synthetic oligonucleotide
cuccugggagugaagucuucc

SEQ ID NO: 2752 - RNA, 21 nt, Artificial Sequence
  Description of Artificial Sequence: Synthetic oligonucleotide
aagacuucacucccaggagcc

SEQ ID NO: 2753 - RNA, 21 nt, Artificial Sequence
  Description of Artificial Sequence: Synthetic oligonucleotide
uccugggagugaagucuuccu

SEQ ID NO: 2754 - RNA, 21 nt, Artificial Sequence
  Description of Artificial Sequence: Synthetic oligonucleotide
gaagacuucacucccaggagc

SEQ ID NO: 2755 - RNA, 21 nt, Artificial Sequence
  Description of Artificial Sequence: Synthetic oligonucleotide
ccugggagugaagucuuccuu

SEQ ID NO: 2756 - RNA, 21 nt, Artificial Sequence
  Description of Artificial Sequence: Synthetic oligonucleotide
ggaagacuucacucccaggag

SEQ ID NO: 2757 - RNA, 21 nt, Artificial Sequence
  Description of Artificial Sequence: Synthetic oligonucleotide
cugggagugaagucuuccuuc

SEQ ID NO: 2758 - RNA, 21 nt, Artificial Sequence
  Description of Artificial Sequence: Synthetic oligonucleotide
aggaagacuucacucccagga

SEQ ID NO: 2759 - RNA, 21 nt, Artificial Sequence
  Description of Artificial Sequence: Synthetic oligonucleotide
ugggagugaagucuuccuucu

SEQ ID NO: 2760 - RNA, 21 nt, Artificial Sequence
  Description of Artificial Sequence: Synthetic oligonucleotide
aaggaagacuucacucccagg

SEQ ID NO: 2761 - RNA, 21 nt, Artificial Sequence
  Description of Artificial Sequence: Synthetic oligonucleotide
gggagugaagucuuccuucua

SEQ ID NO: 2762 - RNA, 21 nt, Artificial Sequence
  Description of Artificial Sequence: Synthetic oligonucleotide
gaaggaagacuucacucccag

SEQ ID NO: 2763 - RNA, 21 nt, Artificial Sequence
  Description of Artificial Sequence: Synthetic oligonucleotide
ggagugaagucuuccuucuau

SEQ ID NO: 2764 - RNA, 21 nt, Artificial Sequence
  Description of Artificial Sequence: Synthetic oligonucleotide
agaaggaagacuucacuccca

SEQ ID NO: 2765 - RNA, 21 nt, Artificial Sequence
  Description of Artificial Sequence: Synthetic oligonucleotide
gagugaagucuuccuucuaug

SEQ ID NO: 2766 - RNA, 21 nt, Artificial Sequence
  Description of Artificial Sequence: Synthetic oligonucleotide
uagaaggaagacuucacuccc

SEQ ID NO: 2767 - RNA, 21 nt, Artificial Sequence
  Description of Artificial Sequence: Synthetic oligonucleotide
agugaagucuuccuucuaugc

SEQ ID NO: 2768 - RNA, 21 nt, Artificial Sequence
  Description of Artificial Sequence: Synthetic oligonucleotide
auagaaggaagacuucacucc

SEQ ID NO: 2769 - RNA, 21 nt, Artificial Sequence
  Description of Artificial Sequence: Synthetic oligonucleotide
gugaagucuuccuucuaugcc

SEQ ID NO: 2770 - RNA, 21 nt, Artificial Sequence
  Description of Artificial Sequence: Synthetic oligonucleotide
cauagaaggaagacuucacuc

SEQ ID NO: 2771 - RNA, 21 nt, Artificial Sequence
  Description of Artificial Sequence: Synthetic oligonucleotide
ugaagucuuccuucuaugccc

SEQ ID NO: 2772 - RNA, 21 nt, Artificial Sequence
  Description of Artificial Sequence: Synthetic oligonucleotide
gcauagaaggaagacuucacu

SEQ ID NO: 2773 - RNA, 21 nt, Artificial Sequence
  Description of Artificial Sequence: Synthetic oligonucleotide
gaagucuuccuucuaugccca

SEQ ID NO: 2774 - RNA, 21 nt, Artificial Sequence
  Description of Artificial Sequence: Synthetic oligonucleotide
ggcauagaaggaagacuucac

SEQ ID NO: 2775 - RNA, 21 nt, Artificial Sequence
  Description of Artificial Sequence: Synthetic oligonucleotide
aagucuuccuucuaugcccaa

SEQ ID NO: 2776 - RNA, 21 nt, Artificial Sequence
  Description of Artificial Sequence: Synthetic oligonucleotide
gggcauagaaggaagacuuca

SEQ ID NO: 2777 - RNA, 21 nt, Artificial Sequence
  Description of Artificial Sequence: Synthetic oligonucleotide
agucuuccuucuaugcccaag

SEQ ID NO: 2778 - RNA, 21 nt, Artificial Sequence
  Description of Artificial Sequence: Synthetic oligonucleotide
ugggcauagaaggaagacuuc

SEQ ID NO: 2779 - RNA, 21 nt, Artificial Sequence
  Description of Artificial Sequence: Synthetic oligonucleotide
gucuuccuucuaugcccaaga

SEQ ID NO: 2780 - RNA, 21 nt, Artificial Sequence
  Description of Artificial Sequence: Synthetic oligonucleotide
uugggcauagaaggaagacuu

SEQ ID NO: 2781 - RNA, 21 nt, Artificial Sequence
  Description of Artificial Sequence: Synthetic oligonucleotide
ucuuccuucuaugcccaagau

SEQ ID NO: 2782 - RNA, 21 nt, Artificial Sequence
  Description of Artificial Sequence: Synthetic oligonucleotide
cuugggcauagaaggaagacu

SEQ ID NO: 2783 - RNA, 21 nt, Artificial Sequence
  Description of Artificial Sequence: Synthetic oligonucleotide
cuuccuucuaugcccaagaug

SEQ ID NO: 2784 - RNA, 21 nt, Artificial Sequence
  Description of Artificial Sequence: Synthetic oligonucleotide
ucuugggcauagaaggaagac

SEQ ID NO: 2785 - RNA, 21 nt, Artificial Sequence
  Description of Artificial Sequence: Synthetic oligonucleotide
uuccuucuaugcccaagaugc

SEQ ID NO: 2786 - RNA, 21 nt, Artificial Sequence
  Description of Artificial Sequence: Synthetic oligonucleotide
aucuugggcauagaaggaaga

SEQ ID NO: 2787 - RNA, 21 nt, Artificial Sequence
  Description of Artificial Sequence: Synthetic oligonucleotide
uccuucuaugcccaagaugcg

SEQ ID NO: 2788 - RNA, 21 nt, Artificial Sequence
  Description of Artificial Sequence: Synthetic oligonucleotide
caucuugggcauagaaggaag

SEQ ID NO: 2789 - RNA, 21 nt, Artificial Sequence
  Description of Artificial Sequence: Synthetic oligonucleotide
ccuucuaugcccaagaugcgc

SEQ ID NO: 2790 - RNA, 21 nt, Artificial Sequence
  Description of Artificial Sequence: Synthetic oligonucleotide
gcaucuugggcauagaaggaa

SEQ ID NO: 2791 - RNA, 21 nt, Artificial Sequence
  Description of Artificial Sequence: Synthetic oligonucleotide
cuucuaugcccaagaugcgcu

SEQ ID NO: 2792 - RNA, 21 nt, Artificial Sequence
  Description of Artificial Sequence: Synthetic oligonucleotide
cgcaucuugggcauagaagga

SEQ ID NO: 2793 - RNA, 21 nt, Artificial Sequence
  Description of Artificial Sequence: Synthetic oligonucleotide
uucuaugcccaagaugcgcug

SEQ ID NO: 2794 - RNA, 21 nt, Artificial Sequence
  Description of Artificial Sequence: Synthetic oligonucleotide
gcgcaucuugggcauagaagg

SEQ ID NO: 2795 - RNA, 21 nt, Artificial Sequence
  Description of Artificial Sequence: Synthetic oligonucleotide
ucuaugcccaagaugcgcugc

SEQ ID NO: 2796 - RNA, 21 nt, Artificial Sequence
  Description of Artificial Sequence: Synthetic oligonucleotide
agcgcaucuugggcauagaag

SEQ ID NO: 2797 - RNA, 21 nt, Artificial Sequence
  Description of Artificial Sequence: Synthetic oligonucleotide
cuaugcccaagaugcgcugcg

SEQ ID NO: 2798 - RNA, 21 nt, Artificial Sequence
  Description of Artificial Sequence: Synthetic oligonucleotide
cagcgcaucuugggcauagaa

SEQ ID NO: 2799 - RNA, 21 nt, Artificial Sequence
  Description of Artificial Sequence: Synthetic oligonucleotide
uaugcccaagaugcgcugcgg

SEQ ID NO: 2800 - RNA, 21 nt, Artificial Sequence
  Description of Artificial Sequence: Synthetic oligonucleotide
gcagcgcaucuugggcauaga

SEQ ID NO: 2801 - RNA, 21 nt, Artificial Sequence
  Description of Artificial Sequence: Synthetic oligonucleotide
augcccaagaugcgcugcggc

SEQ ID NO: 2802 - RNA, 21 nt, Artificial Sequence
  Description of Artificial Sequence: Synthetic oligonucleotide
cgcagcgcaucuugggcauag

SEQ ID NO: 2803 - RNA, 21 nt, Artificial Sequence
  Description of Artificial Sequence: Synthetic oligonucleotide
ugcccaagaugcgcugcggcu

SEQ ID NO: 2804 - RNA, 21 nt, Artificial Sequence
  Description of Artificial Sequence: Synthetic oligonucleotide
ccgcagcgcaucuugggcaua

SEQ ID NO: 2805 - RNA, 21 nt, Artificial Sequence
  Description of Artificial Sequence: Synthetic oligonucleotide
gcccaagaugcgcugcggcuc

SEQ ID NO: 2806 - RNA, 21 nt, Artificial Sequence
  Description of Artificial Sequence: Synthetic oligonucleotide
gccgcagcgcaucuugggcau

SEQ ID NO: 2807 - RNA, 21 nt, Artificial Sequence
  Description of Artificial Sequence: Synthetic oligonucleotide
cccaagaugcgcugcggcucu

SEQ ID NO: 2808 - RNA, 21 nt, Artificial Sequence
  Description of Artificial Sequence: Synthetic oligonucleotide
agccgcagcgcaucuugggca

SEQ ID NO: 2809 - RNA, 21 nt, Artificial Sequence
  Description of Artificial Sequence: Synthetic oligonucleotide
ccaagaugcgcugcggcucug

SEQ ID NO: 2810 - RNA, 21 nt, Artificial Sequence
  Description of Artificial Sequence: Synthetic oligonucleotide
gagccgcagcgcaucuugggc

SEQ ID NO: 2811 - RNA, 21 nt, Artificial Sequence
  Description of Artificial Sequence: Synthetic oligonucleotide
caagaugcgcugcggcucugg

SEQ ID NO: 2812 - RNA, 21 nt, Artificial Sequence
  Description of Artificial Sequence: Synthetic oligonucleotide
agagccgcagcgcaucuuggg

SEQ ID NO: 2813 - RNA, 21 nt, Artificial Sequence
  Description of Artificial Sequence: Synthetic oligonucleotide
aagaugcgcugcggcucuggg

SEQ ID NO: 2814 - RNA, 21 nt, Artificial Sequence
  Description of Artificial Sequence: Synthetic oligonucleotide
cagagccgcagcgcaucuugg

SEQ ID NO: 2815 - RNA, 21 nt, Artificial Sequence
  Description of Artificial Sequence: Synthetic oligonucleotide
agaugcgcugcggcucuggga

SEQ ID NO: 2816 - RNA, 21 nt, Artificial Sequence
  Description of Artificial Sequence: Synthetic oligonucleotide
ccagagccgcagcgcaucuug

SEQ ID NO: 2817 - RNA, 21 nt, Artificial Sequence
  Description of Artificial Sequence: Synthetic oligonucleotide
gaugcgcugcggcucugggaa

SEQ ID NO: 2818 - RNA, 21 nt, Artificial Sequence
  Description of Artificial Sequence: Synthetic oligonucleotide
cccagagccgcagcgcaucuu

SEQ ID NO: 2819 - RNA, 21 nt, Artificial Sequence
  Description of Artificial Sequence: Synthetic oligonucleotide
augcgcugcggcucugggaaa

SEQ ID NO: 2820 - RNA, 21 nt, Artificial Sequence
  Description of Artificial Sequence: Synthetic oligonucleotide
ucccagagccgcagcgcaucu

SEQ ID NO: 2821 - RNA, 21 nt, Artificial Sequence
  Description of Artificial Sequence: Synthetic oligonucleotide
ugcgcugcggcucugggaaau

SEQ ID NO: 2822 - RNA, 21 nt, Artificial Sequence
  Description of Artificial Sequence: Synthetic oligonucleotide
uucccagagccgcagcgcauc

SEQ ID NO: 2823 - RNA, 21 nt, Artificial Sequence
  Description of Artificial Sequence: Synthetic oligonucleotide
gcgcugcggcucugggaaauc

SEQ ID NO: 2824 - RNA, 21 nt, Artificial Sequence
  Description of Artificial Sequence: Synthetic oligonucleotide
uuucccagagccgcagcgcau

SEQ ID NO: 2825 - RNA, 21 nt, Artificial Sequence
  Description of Artificial Sequence: Synthetic oligonucleotide
cgcugcggcucugggaaauca

SEQ ID NO: 2826 - RNA, 21 nt, Artificial Sequence
  Description of Artificial Sequence: Synthetic oligonucleotide
auuucccagagccgcagcgca

SEQ ID NO: 2827 - RNA, 21 nt, Artificial Sequence
  Description of Artificial Sequence: Synthetic oligonucleotide
gcugcggcucugggaaaucau

SEQ ID NO: 2828 - RNA, 21 nt, Artificial Sequence
  Description of Artificial Sequence: Synthetic oligonucleotide
gauuucccagagccgcagcgc

SEQ ID NO: 2829 - RNA, 21 nt, Artificial Sequence
  Description of Artificial Sequence: Synthetic oligonucleotide
cugcggcucugggaaaucauc

SEQ ID NO: 2830 - RNA, 21 nt, Artificial Sequence
  Description of Artificial Sequence: Synthetic oligonucleotide
ugauuucccagagccgcagcg

SEQ ID NO: 2831 - RNA, 21 nt, Artificial Sequence
  Description of Artificial Sequence: Synthetic oligonucleotide
ugcggcucugggaaaucaucu

SEQ ID NO: 2832 - RNA, 21 nt, Artificial Sequence
  Description of Artificial Sequence: Synthetic oligonucleotide
augauuucccagagccgcagc

SEQ ID NO: 2833 - RNA, 21 nt, Artificial Sequence
  Description of Artificial Sequence: Synthetic oligonucleotide
gcggcucugggaaaucaucua

SEQ ID NO: 2834 - RNA, 21 nt, Artificial Sequence
  Description of Artificial Sequence: Synthetic oligonucleotide
gaugauuucccagagccgcag

SEQ ID NO: 2835 - RNA, 21 nt, Artificial Sequence
  Description of Artificial Sequence: Synthetic oligonucleotide
cggcucugggaaaucaucuau

SEQ ID NO: 2836 - RNA, 21 nt, Artificial Sequence
  Description of Artificial Sequence: Synthetic oligonucleotide
agaugauuucccagagccgca

SEQ ID NO: 2837 - RNA, 21 nt, Artificial Sequence
  Description of Artificial Sequence: Synthetic oligonucleotide
ggcucugggaaaucaucuauc

SEQ ID NO: 2838 - RNA, 21 nt, Artificial Sequence
  Description of Artificial Sequence: Synthetic oligonucleotide
uagaugauuucccagagccgc

SEQ ID NO: 2839 - RNA, 21 nt, Artificial Sequence
  Description of Artificial Sequence: Synthetic oligonucleotide
gcucugggaaaucaucuaucg

SEQ ID NO: 2840 - RNA, 21 nt, Artificial Sequence
  Description of Artificial Sequence: Synthetic oligonucleotide
auagaugauuucccagagccg

SEQ ID NO: 2841 - RNA, 21 nt, Artificial Sequence
  Description of Artificial Sequence: Synthetic oligonucleotide
cucugggaaaucaucuaucgg

SEQ ID NO: 2842 - RNA, 21 nt, Artificial Sequence
  Description of Artificial Sequence: Synthetic oligonucleotide
gauagaugauuucccagagcc

SEQ ID NO: 2843 - RNA, 21 nt, Artificial Sequence
  Description of Artificial Sequence: Synthetic oligonucleotide
ucugggaaaucaucuaucggu

SEQ ID NO: 2844 - RNA, 21 nt, Artificial Sequence
  Description of Artificial Sequence: Synthetic oligonucleotide
cgauagaugauuucccagagc

SEQ ID NO: 2845 - RNA, 21 nt, Artificial Sequence
  Description of Artificial Sequence: Synthetic oligonucleotide
cugggaaaucaucuaucggua

SEQ ID NO: 2846 - RNA, 21 nt, Artificial Sequence
  Description of Artificial Sequence: Synthetic oligonucleotide
ccgauagaugauuucccagag

SEQ ID NO: 2847 - RNA, 21 nt, Artificial Sequence
  Description of Artificial Sequence: Synthetic oligonucleotide
ugggaaaucaucuaucgguau

SEQ ID NO: 2848 - RNA, 21 nt, Artificial Sequence
  Description of Artificial Sequence: Synthetic oligonucleotide
accgauagaugauuucccaga

SEQ ID NO: 2849 - RNA, 21 nt, Artificial Sequence
  Description of Artificial Sequence: Synthetic oligonucleotide
gggaaaucaucuaucgguaug

SEQ ID NO: 2850 - RNA, 21 nt, Artificial Sequence
  Description of Artificial Sequence: Synthetic oligonucleotide
uaccgauagaugauuucccag

SEQ ID NO: 2851 - RNA, 21 nt, Artificial Sequence
  Description of Artificial Sequence: Synthetic oligonucleotide
ggaaaucaucuaucgguaugu

SEQ ID NO: 2852 - RNA, 21 nt, Artificial Sequence
  Description of Artificial Sequence: Synthetic oligonucleotide
auaccgauagaugauuuccca

SEQ ID NO: 2853 - RNA, 21 nt, Artificial Sequence
  Description of Artificial Sequence: Synthetic oligonucleotide
gaaaucaucuaucgguaugug

SEQ ID NO: 2854 - RNA, 21 nt, Artificial Sequence
  Description of Artificial Sequence: Synthetic oligonucleotide
cauaccgauagaugauuuccc

SEQ ID NO: 2855 - RNA, 21 nt, Artificial Sequence
  Description of Artificial Sequence: Synthetic oligonucleotide
aaaucaucuaucgguaugugg

SEQ ID NO: 2856 - RNA, 21 nt, Artificial Sequence
  Description of Artificial Sequence: Synthetic oligonucleotide
acauaccgauagaugauuucc

SEQ ID NO: 2857 - RNA, 21 nt, Artificial Sequence
  Description of Artificial Sequence: Synthetic oligonucleotide
aaucaucuaucgguaugugga

SEQ ID NO: 2858 - RNA, 21 nt, Artificial Sequence
  Description of Artificial Sequence: Synthetic oligonucleotide
cacauaccgauagaugauuuc

SEQ ID NO: 2859 - RNA, 21 nt, Artificial Sequence
  Description of Artificial Sequence: Synthetic oligonucleotide
aucaucuaucgguauguggaa

SEQ ID NO: 2860 - RNA, 21 nt, Artificial Sequence
  Description of Artificial Sequence: Synthetic oligonucleotide
ccacauaccgauagaugauuu

SEQ ID NO: 2861 - RNA, 21 nt, Artificial Sequence
  Description of Artificial Sequence: Synthetic oligonucleotide
ucaucuaucgguauguggaag

SEQ ID NO: 2862 - RNA, 21 nt, Artificial Sequence
  Description of Artificial Sequence: Synthetic oligonucleotide
uccacauaccgauagaugauu

SEQ ID NO: 2863 - RNA, 21 nt, Artificial Sequence
  Description of Artificial Sequence: Synthetic oligonucleotide
caucuaucgguauguggaagg

SEQ ID NO: 2864 - RNA, 21 nt, Artificial Sequence
  Description of Artificial Sequence: Synthetic oligonucleotide
uuccacauaccgauagaugau

SEQ ID NO: 2865 - RNA, 21 nt, Artificial Sequence
  Description of Artificial Sequence: Synthetic oligonucleotide
aucuaucgguauguggaagga

SEQ ID NO: 2866 - RNA, 21 nt, Artificial Sequence
  Description of Artificial Sequence: Synthetic oligonucleotide
cuuccacauaccgauagauga

SEQ ID NO: 2867 - RNA, 21 nt, Artificial Sequence
  Description of Artificial Sequence: Synthetic oligonucleotide
ucuaucgguauguggaaggaa

SEQ ID NO: 2868 - RNA, 21 nt, Artificial Sequence
  Description of Artificial Sequence: Synthetic oligonucleotide
ccuuccacauaccgauagaug

SEQ ID NO: 2869 - RNA, 21 nt, Artificial Sequence
  Description of Artificial Sequence: Synthetic oligonucleotide
cuaucgguauguggaaggaau

SEQ ID NO: 2870 - RNA, 21 nt, Artificial Sequence
  Description of Artificial Sequence: Synthetic oligonucleotide
uccuuccacauaccgauagau

SEQ ID NO: 2871 - RNA, 21 nt, Artificial Sequence
  Description of Artificial Sequence: Synthetic oligonucleotide
uaucgguauguggaaggaauc

SEQ ID NO: 2872 - RNA, 21 nt, Artificial Sequence
  Description of Artificial Sequence: Synthetic oligonucleotide
uuccuuccacauaccgauaga

SEQ ID NO: 2873 - RNA, 21 nt, Artificial Sequence
  Description of Artificial Sequence: Synthetic oligonucleotide
aucgguauguggaaggaaucg

SEQ ID NO: 2874 - RNA, 21 nt, Artificial Sequence
  Description of Artificial Sequence: Synthetic oligonucleotide
auuccuuccacauaccgauag

SEQ ID NO: 2875 - RNA, 21 nt, Artificial Sequence
  Description of Artificial Sequence: Synthetic oligonucleotide
ucgguauguggaaggaaucgu

SEQ ID NO: 2876 - RNA, 21 nt, Artificial Sequence
  Description of Artificial Sequence: Synthetic oligonucleotide
gauuccuuccacauaccgaua

SEQ ID NO: 2877 - RNA, 21 nt, Artificial Sequence
  Description of Artificial Sequence: Synthetic oligonucleotide
cgguauguggaaggaaucgug

SEQ ID NO: 2878 - RNA, 21 nt, Artificial Sequence
  Description of Artificial Sequence: Synthetic oligonucleotide
cgauuccuuccacauaccgau

SEQ ID NO: 2879 - RNA, 21 nt, Artificial Sequence
  Description of Artificial Sequence: Synthetic oligonucleotide
gguauguggaaggaaucguga

SEQ ID NO: 2880 - RNA, 21 nt, Artificial Sequence
  Description of Artificial Sequence: Synthetic oligonucleotide
acgauuccuuccacauaccga

SEQ ID NO: 2881 - RNA, 21 nt, Artificial Sequence
  Description of Artificial Sequence: Synthetic oligonucleotide
guauguggaaggaaucgugag

SEQ ID NO: 2882 - RNA, 21 nt, Artificial Sequence
  Description of Artificial Sequence: Synthetic oligonucleotide
cacgauuccuuccacauaccg

SEQ ID NO: 2883 - RNA, 21 nt, Artificial Sequence
  Description of Artificial Sequence: Synthetic oligonucleotide
uauguggaaggaaucgugagu

SEQ ID NO: 2884 - RNA, 21 nt, Artificial Sequence
  Description of Artificial Sequence: Synthetic oligonucleotide
ucacgauuccuuccacauacc

SEQ ID NO: 2885 - RNA, 21 nt, Artificial Sequence
  Description of Artificial Sequence: Synthetic oligonucleotide
auguggaaggaaucgugaguc

SEQ ID NO: 2886 - RNA, 21 nt, Artificial Sequence
  Description of Artificial Sequence: Synthetic oligonucleotide
cucacgauuccuuccacauac

SEQ ID NO: 2887 - RNA, 21 nt, Artificial Sequence
  Description of Artificial Sequence: Synthetic oligonucleotide
uguggaaggaaucgugagucu

SEQ ID NO: 2888 - RNA, 21 nt, Artificial Sequence
  Description of Artificial Sequence: Synthetic oligonucleotide
acucacgauuccuuccacaua

SEQ ID NO: 2889 - RNA, 21 nt, Artificial Sequence
  Description of Artificial Sequence: Synthetic oligonucleotide
guggaaggaaucgugagucuc

SEQ ID NO: 2890 - RNA, 21 nt, Artificial Sequence
  Description of Artificial Sequence: Synthetic oligonucleotide
gacucacgauuccuuccacau

SEQ ID NO: 2891 - RNA, 21 nt, Artificial Sequence
  Description of Artificial Sequence: Synthetic oligonucleotide
uggaaggaaucgugagucucc

SEQ ID NO: 2892 - RNA, 21 nt, Artificial Sequence
  Description of Artificial Sequence: Synthetic oligonucleotide
agacucacgauuccuuccaca

SEQ ID NO: 2893 - RNA, 21 nt, Artificial Sequence
  Description of Artificial Sequence: Synthetic oligonucleotide
ggaaggaaucgugagucucca

SEQ ID NO: 2894 - RNA, 21 nt, Artificial Sequence
  Description of Artificial Sequence: Synthetic oligonucleotide
gagacucacgauuccuuccac

SEQ ID NO: 2895 - RNA, 21 nt, Artificial Sequence
  Description of Artificial Sequence: Synthetic oligonucleotide
gaaggaaucgugagucuccac

SEQ ID NO: 2896 - RNA, 21 nt, Artificial Sequence
  Description of Artificial Sequence: Synthetic oligonucleotide
ggagacucacgauuccuucca

SEQ ID NO: 2897 - RNA, 21 nt, Artificial Sequence
  Description of Artificial Sequence: Synthetic oligonucleotide
aaggaaucgugagucuccacu

SEQ ID NO: 2898 - RNA, 21 nt, Artificial Sequence
  Description of Artificial Sequence: Synthetic oligonucleotide
uggagacucacgauuccuucc

SEQ ID NO: 2899 - RNA, 21 nt, Artificial Sequence
  Description of Artificial Sequence: Synthetic oligonucleotide
aggaaucgugagucuccacua

SEQ ID NO: 2900 - RNA, 21 nt, Artificial Sequence
  Description of Artificial Sequence: Synthetic oligonucleotide
guggagacucacgauuccuuc

SEQ ID NO: 2901 - RNA, 21 nt, Artificial Sequence
  Description of Artificial Sequence: Synthetic oligonucleotide
ggaaucgugagucuccacuau

SEQ ID NO: 2902 - RNA, 21 nt, Artificial Sequence
  Description of Artificial Sequence: Synthetic oligonucleotide
aguggagacucacgauuccuu

SEQ ID NO: 2903 - RNA, 21 nt, Artificial Sequence
  Description of Artificial Sequence: Synthetic oligonucleotide
gaaucgugagucuccacuaua

SEQ ID NO: 2904 - RNA, 21 nt, Artificial Sequence
  Description of Artificial Sequence: Synthetic oligonucleotide
uaguggagacucacgauuccu

SEQ ID NO: 2905 - RNA, 21 nt, Artificial Sequence
  Description of Artificial Sequence: Synthetic oligonucleotide
aaucgugagucuccacuauaa

SEQ ID NO: 2906 - RNA, 21 nt, Artificial Sequence
  Description of Artificial Sequence: Synthetic oligonucleotide
auaguggagacucacgauucc

SEQ ID NO: 2907 - RNA, 21 nt, Artificial Sequence
  Description of Artificial Sequence: Synthetic oligonucleotide
aucgugagucuccacuauaag

SEQ ID NO: 2908 - RNA, 21 nt, Artificial Sequence
  Description of Artificial Sequence: Synthetic oligonucleotide
uauaguggagacucacgauuc

SEQ ID NO: 2909 - RNA, 21 nt, Artificial Sequence
  Description of Artificial Sequence: Synthetic oligonucleotide
ucgugagucuccacuauaaga

SEQ ID NO: 2910 - RNA, 21 nt, Artificial Sequence
  Description of Artificial Sequence: Synthetic oligonucleotide
uuauaguggagacucacgauu

SEQ ID NO: 2911 - RNA, 21 nt, Artificial Sequence
  Description of Artificial Sequence: Synthetic oligonucleotide
cgugagucuccacuauaagac

SEQ ID NO: 2912 - RNA, 21 nt, Artificial Sequence
  Description of Artificial Sequence: Synthetic oligonucleotide
cuuauaguggagacucacgau

SEQ ID NO: 2913 - RNA, 21 nt, Artificial Sequence
  Description of Artificial Sequence: Synthetic oligonucleotide
gugagucuccacuauaagaca

SEQ ID NO: 2914 - RNA, 21 nt, Artificial Sequence
  Description of Artificial Sequence: Synthetic oligonucleotide
ucuuauaguggagacucacga

SEQ ID NO: 2915 - RNA, 21 nt, Artificial Sequence
  Description of Artificial Sequence: Synthetic oligonucleotide
ugagucuccacuauaagacag

SEQ ID NO: 2916 - RNA, 21 nt, Artificial Sequence
  Description of Artificial Sequence: Synthetic oligonucleotide
gucuuauaguggagacucacg

SEQ ID NO: 2917 - RNA, 21 nt, Artificial Sequence
  Description of Artificial Sequence: Synthetic oligonucleotide
gagucuccacuauaagacaga

SEQ ID NO: 2918 - RNA, 21 nt, Artificial Sequence
  Description of Artificial Sequence: Synthetic oligonucleotide
ugucuuauaguggagacucac

SEQ ID NO: 2919 - RNA, 21 nt, Artificial Sequence
  Description of Artificial Sequence: Synthetic oligonucleotide
agucuccacuauaagacagac

SEQ ID NO: 2920 - RNA, 21 nt, Artificial Sequence
  Description of Artificial Sequence: Synthetic oligonucleotide
cugucuuauaguggagacuca

SEQ ID NO: 2921 - RNA, 21 nt, Artificial Sequence
  Description of Artificial Sequence: Synthetic oligonucleotide
gucuccacuauaagacagacg

SEQ ID NO: 2922 - RNA, 21 nt, Artificial Sequence
  Description of Artificial Sequence: Synthetic oligonucleotide
ucugucuuauaguggagacuc

SEQ ID NO: 2923 - RNA, 21 nt, Artificial Sequence
  Description of Artificial Sequence: Synthetic oligonucleotide
ucuccacuauaagacagacgu

SEQ ID NO: 2924 - RNA, 21 nt, Artificial Sequence
  Description of Artificial Sequence: Synthetic oligonucleotide
gucugucuuauaguggagacu

SEQ ID NO: 2925 - RNA, 21 nt, Artificial Sequence
  Description of Artificial Sequence: Synthetic oligonucleotide
cuccacuauaagacagacgug

SEQ ID NO: 2926 - RNA, 21 nt, Artificial Sequence
  Description of Artificial Sequence: Synthetic oligonucleotide
cgucugucuuauaguggagac

SEQ ID NO: 2927 - RNA, 21 nt, Artificial Sequence
  Description of Artificial Sequence: Synthetic oligonucleotide
uccacuauaagacagacgugg

SEQ ID NO: 2928 - RNA, 21 nt, Artificial Sequence
  Description of Artificial Sequence: Synthetic oligonucleotide
acgucugucuuauaguggaga

SEQ ID NO: 2929 - RNA, 21 nt, Artificial Sequence
  Description of Artificial Sequence: Synthetic oligonucleotide
ccacuauaagacagacguggc

SEQ ID NO: 2930 - RNA, 21 nt, Artificial Sequence
  Description of Artificial Sequence: Synthetic oligonucleotide
cacgucugucuuauaguggag

SEQ ID NO: 2931 - RNA, 21 nt, Artificial Sequence
  Description of Artificial Sequence: Synthetic oligonucleotide
cacuauaagacagacguggcu

SEQ ID NO: 2932 - RNA, 21 nt, Artificial Sequence
  Description of Artificial Sequence: Synthetic oligonucleotide
ccacgucugucuuauagugga

SEQ ID NO: 2933 - RNA, 21 nt, Artificial Sequence
  Description of Artificial Sequence: Synthetic oligonucleotide
acuauaagacagacguggcug

SEQ ID NO: 2934 - RNA, 21 nt, Artificial Sequence
  Description of Artificial Sequence: Synthetic oligonucleotide
gccacgucugucuuauagugg

SEQ ID NO: 2935 - RNA, 21 nt, Artificial Sequence
  Description of Artificial Sequence: Synthetic oligonucleotide
cuauaagacagacguggcugu

SEQ ID NO: 2936 - RNA, 21 nt, Artificial Sequence
  Description of Artificial Sequence: Synthetic oligonucleotide
agccacgucugucuuauagug

SEQ ID NO: 2937 - RNA, 21 nt, Artificial Sequence
  Description of Artificial Sequence: Synthetic oligonucleotide
uauaagacagacguggcugug

SEQ ID NO: 2938 - RNA, 21 nt, Artificial Sequence
  Description of Artificial Sequence: Synthetic oligonucleotide
cagccacgucugucuuauagu

SEQ ID NO: 2939 - RNA, 21 nt, Artificial Sequence
  Description of Artificial Sequence: Synthetic oligonucleotide
auaagacagacguggcuguga

SEQ ID NO: 2940 - RNA, 21 nt, Artificial Sequence
  Description of Artificial Sequence: Synthetic oligonucleotide
acagccacgucugucuuauag

SEQ ID NO: 2941 - RNA, 21 nt, Artificial Sequence
  Description of Artificial Sequence: Synthetic oligonucleotide
uaagacagacguggcugugaa

SEQ ID NO: 2942 - RNA, 21 nt, Artificial Sequence
  Description of Artificial Sequence: Synthetic oligonucleotide
cacagccacgucugucuuaua

SEQ ID NO: 2943 - RNA, 21 nt, Artificial Sequence
  Description of Artificial Sequence: Synthetic oligonucleotide
aagacagacguggcugugaaa

SEQ ID NO: 2944 - RNA, 21 nt, Artificial Sequence
  Description of Artificial Sequence: Synthetic oligonucleotide
ucacagccacgucugucuuau

SEQ ID NO: 2945 - RNA, 21 nt, Artificial Sequence
  Description of Artificial Sequence: Synthetic oligonucleotide
agacagacguggcugugaaag

SEQ ID NO: 2946 - RNA, 21 nt, Artificial Sequence
  Description of Artificial Sequence: Synthetic oligonucleotide
uucacagccacgucugucuua

SEQ ID NO: 2947 - RNA, 21 nt, Artificial Sequence
  Description of Artificial Sequence: Synthetic oligonucleotide
gacagacguggcugugaaaga

SEQ ID NO: 2948 - RNA, 21 nt, Artificial Sequence
  Description of Artificial Sequence: Synthetic oligonucleotide
uuucacagccacgucugucuu

SEQ ID NO: 2949 - RNA, 21 nt, Artificial Sequence
  Description of Artificial Sequence: Synthetic oligonucleotide
acagacguggcugugaaagac

SEQ ID NO: 2950 - RNA, 21 nt, Artificial Sequence
  Description of Artificial Sequence: Synthetic oligonucleotide
cuuucacagccacgucugucu

SEQ ID NO: 2951 - RNA, 21 nt, Artificial Sequence
  Description of Artificial Sequence: Synthetic oligonucleotide
cagacguggcugugaaagacg

SEQ ID NO: 2952 - RNA, 21 nt, Artificial Sequence
  Description of Artificial Sequence: Synthetic oligonucleotide
ucuuucacagccacgucuguc

SEQ ID NO: 2953 - RNA, 21 nt, Artificial Sequence
  Description of Artificial Sequence: Synthetic oligonucleotide
agacguggcugugaaagacga

SEQ ID NO: 2954 - RNA, 21 nt, Artificial Sequence
  Description of Artificial Sequence: Synthetic oligonucleotide
gucuuucacagccacgucugu

SEQ ID NO: 2955 - RNA, 21 nt, Artificial Sequence
  Description of Artificial Sequence: Synthetic oligonucleotide
gacguggcugugaaagacgac

SEQ ID NO: 2956 - RNA, 21 nt, Artificial Sequence
  Description of Artificial Sequence: Synthetic oligonucleotide
cgucuuucacagccacgucug

SEQ ID NO: 2957 - RNA, 21 nt, Artificial Sequence
  Description of Artificial Sequence: Synthetic oligonucleotide
acguggcugugaaagacgacc

SEQ ID NO: 2958 - RNA, 21 nt, Artificial Sequence
  Description of Artificial Sequence: Synthetic oligonucleotide
ucgucuuucacagccacgucu

SEQ ID NO: 2959 - RNA, 21 nt, Artificial Sequence
  Description of Artificial Sequence: Synthetic oligonucleotide
cguggcugugaaagacgaccc

SEQ ID NO: 2960 - RNA, 21 nt, Artificial Sequence
  Description of Artificial Sequence: Synthetic oligonucleotide
gucgucuuucacagccacguc

SEQ ID NO: 2961 - RNA, 21 nt, Artificial Sequence
  Description of Artificial Sequence: Synthetic oligonucleotide
guggcugugaaagacgaccca

SEQ ID NO: 2962 - RNA, 21 nt, Artificial Sequence
  Description of Artificial Sequence: Synthetic oligonucleotide
ggucgucuuucacagccacgu

SEQ ID NO: 2963 - RNA, 21 nt, Artificial Sequence
  Description of Artificial Sequence: Synthetic oligonucleotide
uggcugugaaagacgacccag

SEQ ID NO: 2964 - RNA, 21 nt, Artificial Sequence
  Description of Artificial Sequence: Synthetic oligonucleotide
gggucgucuuucacagccacg

SEQ ID NO: 2965 - RNA, 21 nt, Artificial Sequence
  Description of Artificial Sequence: Synthetic oligonucleotide
ggcugugaaagacgacccaga

SEQ ID NO: 2966 - RNA, 21 nt, Artificial Sequence
  Description of Artificial Sequence: Synthetic oligonucleotide
ugggucgucuuucacagccac

SEQ ID NO: 2967 - RNA, 21 nt, Artificial Sequence
  Description of Artificial Sequence: Synthetic oligonucleotide
gcugugaaagacgacccagag

SEQ ID NO: 2968 - RNA, 21 nt, Artificial Sequence
  Description of Artificial Sequence: Synthetic oligonucleotide
cugggucgucuuucacagcca

SEQ ID NO: 2969 - RNA, 21 nt, Artificial Sequence
  Description of Artificial Sequence: Synthetic oligonucleotide
cugugaaagacgacccagagc

SEQ ID NO: 2970 - RNA, 21 nt, Artificial Sequence
  Description of Artificial Sequence: Synthetic oligonucleotide
ucugggucgucuuucacagcc

SEQ ID NO: 2971 - RNA, 21 nt, Artificial Sequence
  Description of Artificial Sequence: Synthetic oligonucleotide
ugugaaagacgacccagagcu

SEQ ID NO: 2972 - RNA, 21 nt, Artificial Sequence
  Description of Artificial Sequence: Synthetic oligonucleotide
cucugggucgucuuucacagc

SEQ ID NO: 2973 - RNA, 21 nt, Artificial Sequence
  Description of Artificial Sequence: Synthetic oligonucleotide
gugaaagacgacccagagcug

SEQ ID NO: 2974 - RNA, 21 nt, Artificial Sequence
  Description of Artificial Sequence: Synthetic oligonucleotide
gcucugggucgucuuucacag

SEQ ID NO: 2975 - RNA, 21 nt, Artificial Sequence
  Description of Artificial Sequence: Synthetic oligonucleotide
ugaaagacgacccagagcugc

SEQ ID NO: 2976 - RNA, 21 nt, Artificial Sequence
  Description of Artificial Sequence: Synthetic oligonucleotide
agcucugggucgucuuucaca

SEQ ID NO: 2977 - RNA, 21 nt, Artificial Sequence
  Description of Artificial Sequence: Synthetic oligonucleotide
gaaagacgacccagagcugca

SEQ ID NO: 2978 - RNA, 21 nt, Artificial Sequence
  Description of Artificial Sequence: Synthetic oligonucleotide
cagcucugggucgucuuucac

SEQ ID NO: 2979 - RNA, 21 nt, Artificial Sequence
  Description of Artificial Sequence: Synthetic oligonucleotide
aaagacgacccagagcugcag

SEQ ID NO: 2980 - RNA, 21 nt, Artificial Sequence
  Description of Artificial Sequence: Synthetic oligonucleotide
gcagcucugggucgucuuuca

SEQ ID NO: 2981 - RNA, 21 nt, Artificial Sequence
  Description of Artificial Sequence: Synthetic oligonucleotide
aagacgacccagagcugcaga

SEQ ID NO: 2982 - RNA, 21 nt, Artificial Sequence
  Description of Artificial Sequence: Synthetic oligonucleotide
ugcagcucugggucgucuuuc

SEQ ID NO: 2983 - RNA, 21 nt, Artificial Sequence
  Description of Artificial Sequence: Synthetic oligonucleotide
agacgacccagagcugcagac

SEQ ID NO: 2984 - RNA, 21 nt, Artificial Sequence
  Description of Artificial Sequence: Synthetic oligonucleotide
cugcagcucugggucgucuuu

SEQ ID NO: 2985 - RNA, 21 nt, Artificial Sequence
  Description of Artificial Sequence: Synthetic oligonucleotide
gacgacccagagcugcagacc

SEQ ID NO: 2986 - RNA, 21 nt, Artificial Sequence
  Description of Artificial Sequence: Synthetic oligonucleotide
ucugcagcucugggucgucuu

SEQ ID NO: 2987 - RNA, 21 nt, Artificial Sequence
  Description of Artificial Sequence: Synthetic oligonucleotide
acgacccagagcugcagaccu

SEQ ID NO: 2988 - RNA, 21 nt, Artificial Sequence
  Description of Artificial Sequence: Synthetic oligonucleotide
gucugcagcucugggucgucu

SEQ ID NO: 2989 - RNA, 21 nt, Artificial Sequence
  Description of Artificial Sequence: Synthetic oligonucleotide
cgacccagagcugcagaccug

SEQ ID NO: 2990 - RNA, 21 nt, Artificial Sequence
  Description of Artificial Sequence: Synthetic oligonucleotide
ggucugcagcucugggucguc

SEQ ID NO: 2991 - RNA, 21 nt, Artificial Sequence
  Description of Artificial Sequence: Synthetic oligonucleotide
gacccagagcugcagaccugg

SEQ ID NO: 2992 - RNA, 21 nt, Artificial Sequence
  Description of Artificial Sequence: Synthetic oligonucleotide
aggucugcagcucugggucgu

SEQ ID NO: 2993 - RNA, 21 nt, Artificial Sequence
  Description of Artificial Sequence: Synthetic oligonucleotide
acccagagcugcagaccuggu

SEQ ID NO: 2994 - RNA, 21 nt, Artificial Sequence
  Description of Artificial Sequence: Synthetic oligonucleotide
caggucugcagcucugggucg

SEQ ID NO: 2995 - RNA, 21 nt, Artificial Sequence
  Description of Artificial Sequence: Synthetic oligonucleotide
cccagagcugcagaccuggug

SEQ ID NO: 2996 - RNA, 21 nt, Artificial Sequence
  Description of Artificial Sequence: Synthetic oligonucleotide
ccaggucugcagcucuggguc

SEQ ID NO: 2997 - RNA, 21 nt, Artificial Sequence
  Description of Artificial Sequence: Synthetic oligonucleotide
ccagagcugcagaccuggugu

SEQ ID NO: 2998 - RNA, 21 nt, Artificial Sequence
  Description of Artificial Sequence: Synthetic oligonucleotide
accaggucugcagcucugggu

SEQ ID NO: 2999 - RNA, 21 nt, Artificial Sequence
  Description of Artificial Sequence: Synthetic oligonucleotide
cagagcugcagaccugguguc

SEQ ID NO: 3000 - RNA, 21 nt, Artificial Sequence
  Description of Artificial Sequence: Synthetic oligonucleotide
caccaggucugcagcucuggg

SEQ ID NO: 3001 - RNA, 21 nt, Artificial Sequence
  Description of Artificial Sequence: Synthetic oligonucleotide
agagcugcagaccuggugucg

SEQ ID NO: 3002 - RNA, 21 nt, Artificial Sequence
  Description of Artificial Sequence: Synthetic oligonucleotide
acaccaggucugcagcucugg

SEQ ID NO: 3003 - RNA, 21 nt, Artificial Sequence
  Description of Artificial Sequence: Synthetic oligonucleotide
gagcugcagaccuggugucga

SEQ ID NO: 3004 - RNA, 21 nt, Artificial Sequence
  Description of Artificial Sequence: Synthetic oligonucleotide
gacaccaggucugcagcucug

SEQ ID NO: 3005 - RNA, 21 nt, Artificial Sequence
  Description of Artificial Sequence: Synthetic oligonucleotide
agcugcagaccuggugucgag

SEQ ID NO: 3006 - RNA, 21 nt, Artificial Sequence
  Description of Artificial Sequence: Synthetic oligonucleotide
cgacaccaggucugcagcucu

SEQ ID NO: 3007 - RNA, 21 nt, Artificial Sequence
  Description of Artificial Sequence: Synthetic oligonucleotide
gcugcagaccuggugucgaga

SEQ ID NO: 3008 - RNA, 21 nt, Artificial Sequence
  Description of Artificial Sequence: Synthetic oligonucleotide
ucgacaccaggucugcagcuc

SEQ ID NO: 3009 - RNA, 21 nt, Artificial Sequence
  Description of Artificial Sequence: Synthetic oligonucleotide
cugcagaccuggugucgagag

SEQ ID NO: 3010 - RNA, 21 nt, Artificial Sequence
  Description of Artificial Sequence: Synthetic oligonucleotide
cucgacaccaggucugcagcu

SEQ ID NO: 3011 - RNA, 21 nt, Artificial Sequence
  Description of Artificial Sequence: Synthetic oligonucleotide
ugcagaccuggugucgagaga

SEQ ID NO: 3012 - RNA, 21 nt, Artificial Sequence
  Description of Artificial Sequence: Synthetic oligonucleotide
ucucgacaccaggucugcagc

SEQ ID NO: 3013 - RNA, 21 nt, Artificial Sequence
  Description of Artificial Sequence: Synthetic oligonucleotide
gcagaccuggugucgagagau

SEQ ID NO: 3014 - RNA, 21 nt, Artificial Sequence
  Description of Artificial Sequence: Synthetic oligonucleotide
cucucgacaccaggucugcag

SEQ ID NO: 3015 - RNA, 21 nt, Artificial Sequence
  Description of Artificial Sequence: Synthetic oligonucleotide
cagaccuggugucgagagauc

SEQ ID NO: 3016 - RNA, 21 nt, Artificial Sequence
  Description of Artificial Sequence: Synthetic oligonucleotide
ucucucgacaccaggucugca

SEQ ID NO: 3017 - RNA, 21 nt, Artificial Sequence
  Description of Artificial Sequence: Synthetic oligonucleotide
agaccuggugucgagagauca

SEQ ID NO: 3018 - RNA, 21 nt, Artificial Sequence
  Description of Artificial Sequence: Synthetic oligonucleotide
aucucucgacaccaggucugc

SEQ ID NO: 3019 - RNA, 21 nt, Artificial Sequence
  Description of Artificial Sequence: Synthetic oligonucleotide
gaccuggugucgagagaucac

SEQ ID NO: 3020 - RNA, 21 nt, Artificial Sequence
  Description of Artificial Sequence: Synthetic oligonucleotide
gaucucucgacaccaggucug

SEQ ID NO: 3021 - RNA, 21 nt, Artificial Sequence
  Description of Artificial Sequence: Synthetic oligonucleotide
accuggugucgagagaucacu

SEQ ID NO: 3022 - RNA, 21 nt, Artificial Sequence
  Description of Artificial Sequence: Synthetic oligonucleotide
ugaucucucgacaccaggucu

SEQ ID NO: 3023 - RNA, 21 nt, Artificial Sequence
  Description of Artificial Sequence: Synthetic oligonucleotide
ccuggugucgagagaucacug

SEQ ID NO: 3024 - RNA, 21 nt, Artificial Sequence
  Description of Artificial Sequence: Synthetic oligonucleotide
gugaucucucgacaccagguc

SEQ ID NO: 3025 - RNA, 21 nt, Artificial Sequence
  Description of Artificial Sequence: Synthetic oligonucleotide
cuggugucgagagaucacuga

SEQ ID NO: 3026 - RNA, 21 nt, Artificial Sequence
  Description of Artificial Sequence: Synthetic oligonucleotide
agugaucucucgacaccaggu

SEQ ID NO: 3027 - RNA, 21 nt, Artificial Sequence
  Description of Artificial Sequence: Synthetic oligonucleotide
uggugucgagagaucacugaa

SEQ ID NO: 3028 - RNA, 21 nt, Artificial Sequence
  Description of Artificial Sequence: Synthetic oligonucleotide
cagugaucucucgacaccagg

SEQ ID NO: 3029 - RNA, 21 nt, Artificial Sequence
  Description of Artificial Sequence: Synthetic oligonucleotide
ggugucgagagaucacugaaa

SEQ ID NO: 3030 - RNA, 21 nt, Artificial Sequence
  Description of Artificial Sequence: Synthetic oligonucleotide
ucagugaucucucgacaccag

SEQ ID NO: 3031 - RNA, 21 nt, Artificial Sequence
  Description of Artificial Sequence: Synthetic oligonucleotide
gugucgagagaucacugaaau

SEQ ID NO: 3032 - RNA, 21 nt, Artificial Sequence
  Description of Artificial Sequence: Synthetic oligonucleotide
uucagugaucucucgacacca

SEQ ID NO: 3033 - RNA, 21 nt, Artificial Sequence
  Description of Artificial Sequence: Synthetic oligonucleotide
ugucgagagaucacugaaauc

SEQ ID NO: 3034 - RNA, 21 nt, Artificial Sequence
  Description of Artificial Sequence: Synthetic oligonucleotide
uuucagugaucucucgacacc

SEQ ID NO: 3035 - RNA, 21 nt, Artificial Sequence
  Description of Artificial Sequence: Synthetic oligonucleotide
gucgagagaucacugaaaucg

SEQ ID NO: 3036 - RNA, 21 nt, Artificial Sequence
  Description of Artificial Sequence: Synthetic oligonucleotide
auuucagugaucucucgacac

SEQ ID NO: 3037 - RNA, 21 nt, Artificial Sequence
  Description of Artificial Sequence: Synthetic oligonucleotide
ucgagagaucacugaaaucgg

SEQ ID NO: 3038 - RNA, 21 nt, Artificial Sequence
  Description of Artificial Sequence: Synthetic oligonucleotide
gauuucagugaucucucgaca

SEQ ID NO: 3039 - RNA, 21 nt, Artificial Sequence
  Description of Artificial Sequence: Synthetic oligonucleotide
cgagagaucacugaaaucggg

SEQ ID NO: 3040 - RNA, 21 nt, Artificial Sequence
  Description of Artificial Sequence: Synthetic oligonucleotide
cgauuucagugaucucucgac

SEQ ID NO: 3041 - RNA, 21 nt, Artificial Sequence
  Description of Artificial Sequence: Synthetic oligonucleotide
gagagaucacugaaaucgggc

SEQ ID NO: 3042 - RNA, 21 nt, Artificial Sequence
  Description of Artificial Sequence: Synthetic oligonucleotide
ccgauuucagugaucucucga

SEQ ID NO: 3043 - RNA, 21 nt, Artificial Sequence
  Description of Artificial Sequence: Synthetic oligonucleotide
agagaucacugaaaucgggcu

SEQ ID NO: 3044 - RNA, 21 nt, Artificial Sequence
  Description of Artificial Sequence: Synthetic oligonucleotide
cccgauuucagugaucucucg

SEQ ID NO: 3045 - RNA, 21 nt, Artificial Sequence
  Description of Artificial Sequence: Synthetic oligonucleotide
gagaucacugaaaucgggcug

SEQ ID NO: 3046 - RNA, 21 nt, Artificial Sequence
  Description of Artificial Sequence: Synthetic oligonucleotide
gcccgauuucagugaucucuc

SEQ ID NO: 3047 - RNA, 21 nt, Artificial Sequence
  Description of Artificial Sequence: Synthetic oligonucleotide
agaucacugaaaucgggcugc

SEQ ID NO: 3048 - RNA, 21 nt, Artificial Sequence
  Description of Artificial Sequence: Synthetic oligonucleotide
agcccgauuucagugaucucu

SEQ ID NO: 3049 - RNA, 21 nt, Artificial Sequence
  Description of Artificial Sequence: Synthetic oligonucleotide
gaucacugaaaucgggcugca

SEQ ID NO: 3050 - RNA, 21 nt, Artificial Sequence
  Description of Artificial Sequence: Synthetic oligonucleotide
cagcccgauuucagugaucuc

SEQ ID NO: 3051 - RNA, 21 nt, Artificial Sequence
  Description of Artificial Sequence: Synthetic oligonucleotide
aucacugaaaucgggcugcaa

SEQ ID NO: 3052 - RNA, 21 nt, Artificial Sequence
  Description of Artificial Sequence: Synthetic oligonucleotide
gcagcccgauuucagugaucu

SEQ ID NO: 3053 - RNA, 21 nt, Artificial Sequence
  Description of Artificial Sequence: Synthetic oligonucleotide
ucacugaaaucgggcugcaag

SEQ ID NO: 3054 - RNA, 21 nt, Artificial Sequence
  Description of Artificial Sequence: Synthetic oligonucleotide
ugcagcccgauuucagugauc

SEQ ID NO: 3055 - RNA, 21 nt, Artificial Sequence
  Description of Artificial Sequence: Synthetic oligonucleotide
cacugaaaucgggcugcaagg

SEQ ID NO: 3056 - RNA, 21 nt, Artificial Sequence
  Description of Artificial Sequence: Synthetic oligonucleotide
uugcagcccgauuucagugau

SEQ ID NO: 3057 - RNA, 21 nt, Artificial Sequence
  Description of Artificial Sequence: Synthetic oligonucleotide
acugaaaucgggcugcaaggg

SEQ ID NO: 3058 - RNA, 21 nt, Artificial Sequence
  Description of Artificial Sequence: Synthetic oligonucleotide
cuugcagcccgauuucaguga

SEQ ID NO: 3059 - RNA, 21 nt, Artificial Sequence
  Description of Artificial Sequence: Synthetic oligonucleotide
cugaaaucgggcugcaagggg

SEQ ID NO: 3060 - RNA, 21 nt, Artificial Sequence
  Description of Artificial Sequence: Synthetic oligonucleotide
ccuugcagcccgauuucagug

SEQ ID NO: 3061 - RNA, 21 nt, Artificial Sequence
  Description of Artificial Sequence: Synthetic oligonucleotide
ugaaaucgggcugcaaggggc

SEQ ID NO: 3062 - RNA, 21 nt, Artificial Sequence
  Description of Artificial Sequence: Synthetic oligonucleotide
cccuugcagcccgauuucagu

SEQ ID NO: 3063 - RNA, 21 nt, Artificial Sequence
  Description of Artificial Sequence: Synthetic oligonucleotide
gaaaucgggcugcaaggggcc

SEQ ID NO: 3064 - RNA, 21 nt, Artificial Sequence
  Description of Artificial Sequence: Synthetic oligonucleotide
ccccuugcagcccgauuucag

SEQ ID NO: 3065 - RNA, 21 nt, Artificial Sequence
  Description of Artificial Sequence: Synthetic oligonucleotide
aaaucgggcugcaaggggccc

SEQ ID NO: 3066 - RNA, 21 nt, Artificial Sequence
  Description of Artificial Sequence: Synthetic oligonucleotide
gccccuugcagcccgauuuca

SEQ ID NO: 3067 - RNA, 21 nt, Artificial Sequence
  Description of Artificial Sequence: Synthetic oligonucleotide
aaucgggcugcaaggggccca

SEQ ID NO: 3068 - RNA, 21 nt, Artificial Sequence
  Description of Artificial Sequence: Synthetic oligonucleotide
ggccccuugcagcccgauuuc

SEQ ID NO: 3069 - RNA, 21 nt, Artificial Sequence
  Description of Artificial Sequence: Synthetic oligonucleotide
aucgggcugcaaggggcccag

SEQ ID NO: 3070 - RNA, 21 nt, Artificial Sequence
  Description of Artificial Sequence: Synthetic oligonucleotide
gggccccuugcagcccgauuu

SEQ ID NO: 3071 - RNA, 21 nt, Artificial Sequence
  Description of Artificial Sequence: Synthetic oligonucleotide
ucgggcugcaaggggcccagg

SEQ ID NO: 3072 - RNA, 21 nt, Artificial Sequence
  Description of Artificial Sequence: Synthetic oligonucleotide
ugggccccuugcagcccgauu

SEQ ID NO: 3073 - RNA, 21 nt, Artificial Sequence
  Description of Artificial Sequence: Synthetic oligonucleotide
cgggcugcaaggggcccagga

SEQ ID NO: 3074 - RNA, 21 nt, Artificial Sequence
  Description of Artificial Sequence: Synthetic oligonucleotide
cugggccccuugcagcccgau

SEQ ID NO: 3075 - RNA, 21 nt, Artificial Sequence
  Description of Artificial Sequence: Synthetic oligonucleotide
gggcugcaaggggcccaggac

SEQ ID NO: 3076 - RNA, 21 nt, Artificial Sequence
  Description of Artificial Sequence: Synthetic oligonucleotide
ccugggccccuugcagcccga

SEQ ID NO: 3077 - RNA, 21 nt, Artificial Sequence
  Description of Artificial Sequence: Synthetic oligonucleotide
ggcugcaaggggcccaggacc

SEQ ID NO: 3078 - RNA, 21 nt, Artificial Sequence
  Description of Artificial Sequence: Synthetic oligonucleotide
uccugggccccuugcagcccg

SEQ ID NO: 3079 - RNA, 21 nt, Artificial Sequence
  Description of Artificial Sequence: Synthetic oligonucleotide
gcugcaaggggcccaggaccg

SEQ ID NO: 3080 - RNA, 21 nt, Artificial Sequence
  Description of Artificial Sequence: Synthetic oligonucleotide
guccugggccccuugcagccc

SEQ ID NO: 3081 - RNA, 21 nt, Artificial Sequence
  Description of Artificial Sequence: Synthetic oligonucleotide
cugcaaggggcccaggaccga

SEQ ID NO: 3082 - RNA, 21 nt, Artificial Sequence
  Description of Artificial Sequence: Synthetic oligonucleotide
gguccugggccccuugcagcc

SEQ ID NO: 3083 - RNA, 21 nt, Artificial Sequence
  Description of Artificial Sequence: Synthetic oligonucleotide
ugcaaggggcccaggaccgag

SEQ ID NO: 3084 - RNA, 21 nt, Artificial Sequence
  Description of Artificial Sequence: Synthetic oligonucleotide
cgguccugggccccuugcagc

SEQ ID NO: 3085 - RNA, 21 nt, Artificial Sequence
  Description of Artificial Sequence: Synthetic oligonucleotide
gcaaggggcccaggaccgagg

SEQ ID NO: 3086 - RNA, 21 nt, Artificial Sequence
  Description of Artificial Sequence: Synthetic oligonucleotide
ucgguccugggccccuugcag

SEQ ID NO: 3087 - RNA, 21 nt, Artificial Sequence
  Description of Artificial Sequence: Synthetic oligonucleotide
caaggggcccaggaccgaggg

SEQ ID NO: 3088 - RNA, 21 nt, Artificial Sequence
  Description of Artificial Sequence: Synthetic oligonucleotide
cucgguccugggccccuugca

SEQ ID NO: 3089 - RNA, 21 nt, Artificial Sequence
  Description of Artificial Sequence: Synthetic oligonucleotide
aaggggcccaggaccgagggu

SEQ ID NO: 3090 - RNA, 21 nt, Artificial Sequence
  Description of Artificial Sequence: Synthetic oligonucleotide
ccucgguccugggccccuugc

SEQ ID NO: 3091 - RNA, 21 nt, Artificial Sequence
  Description of Artificial Sequence: Synthetic oligonucleotide
aggggcccaggaccgaggguu

SEQ ID NO: 3092 - RNA, 21 nt, Artificial Sequence
  Description of Artificial Sequence: Synthetic oligonucleotide
cccucgguccugggccccuug

SEQ ID NO: 3093 - RNA, 21 nt, Artificial Sequence
  Description of Artificial Sequence: Synthetic oligonucleotide
ggggcccaggaccgaggguuu

SEQ ID NO: 3094 - RNA, 21 nt, Artificial Sequence
  Description of Artificial Sequence: Synthetic oligonucleotide
acccucgguccugggccccuu

SEQ ID NO: 3095 - RNA, 21 nt, Artificial Sequence
  Description of Artificial Sequence: Synthetic oligonucleotide
gggcccaggaccgaggguuuc

SEQ ID NO: 3096 - RNA, 21 nt, Artificial Sequence
  Description of Artificial Sequence: Synthetic oligonucleotide
aacccucgguccugggccccu

SEQ ID NO: 3097 - RNA, 21 nt, Artificial Sequence
  Description of Artificial Sequence: Synthetic oligonucleotide
ggcccaggaccgaggguuucc

SEQ ID NO: 3098 - RNA, 21 nt, Artificial Sequence
  Description of Artificial Sequence: Synthetic oligonucleotide
aaacccucgguccugggcccc

SEQ ID NO: 3099 - RNA, 21 nt, Artificial Sequence
  Description of Artificial Sequence: Synthetic oligonucleotide
gcccaggaccgaggguuuccu

SEQ ID NO: 3100 - RNA, 21 nt, Artificial Sequence
  Description of Artificial Sequence: Synthetic oligonucleotide
gaaacccucgguccugggccc

SEQ ID NO: 3101 - RNA, 21 nt, Artificial Sequence
  Description of Artificial Sequence: Synthetic oligonucleotide
cccaggaccgaggguuuccug

SEQ ID NO: 3102 - RNA, 21 nt, Artificial Sequence
  Description of Artificial Sequence: Synthetic oligonucleotide
ggaaacccucgguccugggcc

SEQ ID NO: 3103 - RNA, 21 nt, Artificial Sequence
  Description of Artificial Sequence: Synthetic oligonucleotide
ccaggaccgaggguuuccugu

SEQ ID NO: 3104 - RNA, 21 nt, Artificial Sequence
  Description of Artificial Sequence: Synthetic oligonucleotide
aggaaacccucgguccugggc

SEQ ID NO: 3105 - RNA, 21 nt, Artificial Sequence
  Description of Artificial Sequence: Synthetic oligonucleotide
caggaccgaggguuuccuguc

SEQ ID NO: 3106 - RNA, 21 nt, Artificial Sequence
  Description of Artificial Sequence: Synthetic oligonucleotide
caggaaacccucgguccuggg

SEQ ID NO: 3107 - RNA, 21 nt, Artificial Sequence
  Description of Artificial Sequence: Synthetic oligonucleotide
aggaccgaggguuuccugucu

SEQ ID NO: 3108 - RNA, 21 nt, Artificial Sequence
  Description of Artificial Sequence: Synthetic oligonucleotide
acaggaaacccucgguccugg

SEQ ID NO: 3109 - RNA, 21 nt, Artificial Sequence
  Description of Artificial Sequence: Synthetic oligonucleotide
ggaccgaggguuuccugucuc

SEQ ID NO: 3110 - RNA, 21 nt, Artificial Sequence
  Description of Artificial Sequence: Synthetic oligonucleotide
gacaggaaacccucgguccug

SEQ ID NO: 3111 - RNA, 21 nt, Artificial Sequence
  Description of Artificial Sequence: Synthetic oligonucleotide
gaccgaggguuuccugucucu

SEQ ID NO: 3112 - RNA, 21 nt, Artificial Sequence
  Description of Artificial Sequence: Synthetic oligonucleotide
agacaggaaacccucgguccu

SEQ ID NO: 3113 - RNA, 21 nt, Artificial Sequence
  Description of Artificial Sequence: Synthetic oligonucleotide
accgaggguuuccugucucuu

SEQ ID NO: 3114 - RNA, 21 nt, Artificial Sequence
  Description of Artificial Sequence: Synthetic oligonucleotide
gagacaggaaacccucggucc

SEQ ID NO: 3115 - RNA, 21 nt, Artificial Sequence
  Description of Artificial Sequence: Synthetic oligonucleotide
ccgaggguuuccugucucuuu

SEQ ID NO: 3116 - RNA, 21 nt, Artificial Sequence
  Description of Artificial Sequence: Synthetic oligonucleotide
agagacaggaaacccucgguc

SEQ ID NO: 3117 - RNA, 21 nt, Artificial Sequence
  Description of Artificial Sequence: Synthetic oligonucleotide
cgaggguuuccugucucuuua

SEQ ID NO: 3118 - RNA, 21 nt, Artificial Sequence
  Description of Artificial Sequence: Synthetic oligonucleotide
aagagacaggaaacccucggu

SEQ ID NO: 3119 - RNA, 21 nt, Artificial Sequence
  Description of Artificial Sequence: Synthetic oligonucleotide
gaggguuuccugucucuuuac

SEQ ID NO: 3120 - RNA, 21 nt, Artificial Sequence
  Description of Artificial Sequence: Synthetic oligonucleotide
aaagagacaggaaacccucgg

SEQ ID NO: 3121 - RNA, 21 nt, Artificial Sequence
  Description of Artificial Sequence: Synthetic oligonucleotide
aggguuuccugucucuuuaca

SEQ ID NO: 3122 - RNA, 21 nt, Artificial Sequence
  Description of Artificial Sequence: Synthetic oligonucleotide
uaaagagacaggaaacccucg

SEQ ID NO: 3123 - RNA, 21 nt, Artificial Sequence
  Description of Artificial Sequence: Synthetic oligonucleotide
ggguuuccugucucuuuacag

SEQ ID NO: 3124 - RNA, 21 nt, Artificial Sequence
  Description of Artificial Sequence: Synthetic oligonucleotide
guaaagagacaggaaacccuc

SEQ ID NO: 3125 - RNA, 21 nt, Artificial Sequence
  Description of Artificial Sequence: Synthetic oligonucleotide
gguuuccugucucuuuacagg

SEQ ID NO: 3126 - RNA, 21 nt, Artificial Sequence
  Description of Artificial Sequence: Synthetic oligonucleotide
uguaaagagacaggaaacccu

SEQ ID NO: 3127 - RNA, 21 nt, Artificial Sequence
  Description of Artificial Sequence: Synthetic oligonucleotide
guuuccugucucuuuacaggc

SEQ ID NO: 3128 - RNA, 21 nt, Artificial Sequence
  Description of Artificial Sequence: Synthetic oligonucleotide
cuguaaagagacaggaaaccc

SEQ ID NO: 3129 - RNA, 21 nt, Artificial Sequence
  Description of Artificial Sequence: Synthetic oligonucleotide
uuuccugucucuuuacaggcu

SEQ ID NO: 3130 - RNA, 21 nt, Artificial Sequence
  Description of Artificial Sequence: Synthetic oligonucleotide
ccuguaaagagacaggaaacc

SEQ ID NO: 3131 - RNA, 21 nt, Artificial Sequence
  Description of Artificial Sequence: Synthetic oligonucleotide
uuccugucucuuuacaggcuc

SEQ ID NO: 3132 - RNA, 21 nt, Artificial Sequence
  Description of Artificial Sequence: Synthetic oligonucleotide
gccuguaaagagacaggaaac

SEQ ID NO: 3133 - RNA, 21 nt, Artificial Sequence
  Description of Artificial Sequence: Synthetic oligonucleotide
uccugucucuuuacaggcucg

SEQ ID NO: 3134 - RNA, 21 nt, Artificial Sequence
  Description of Artificial Sequence: Synthetic oligonucleotide
agccuguaaagagacaggaaa

SEQ ID NO: 3135 - RNA, 21 nt, Artificial Sequence
  Description of Artificial Sequence: Synthetic oligonucleotide
ccugucucuuuacaggcucgg

SEQ ID NO: 3136 - RNA, 21 nt, Artificial Sequence
  Description of Artificial Sequence: Synthetic oligonucleotide
gagccuguaaagagacaggaa

SEQ ID NO: 3137 - RNA, 21 nt, Artificial Sequence
  Description of Artificial Sequence: Synthetic oligonucleotide
cugucucuuuacaggcucggg

SEQ ID NO: 3138 - RNA, 21 nt, Artificial Sequence
  Description of Artificial Sequence: Synthetic oligonucleotide
cgagccuguaaagagacagga

SEQ ID NO: 3139 - RNA, 21 nt, Artificial Sequence
  Description of Artificial Sequence: Synthetic oligonucleotide
ugucucuuuacaggcucggga

SEQ ID NO: 3140 - RNA, 21 nt, Artificial Sequence
  Description of Artificial Sequence: Synthetic oligonucleotide
ccgagccuguaaagagacagg

SEQ ID NO: 3141 - RNA, 21 nt, Artificial Sequence
  Description of Artificial Sequence: Synthetic oligonucleotide
gucucuuuacaggcucgggac

SEQ ID NO: 3142 - RNA, 21 nt, Artificial Sequence
  Description of Artificial Sequence: Synthetic oligonucleotide
cccgagccuguaaagagacag

SEQ ID NO: 3143 - RNA, 21 nt, Artificial Sequence
  Description of Artificial Sequence: Synthetic oligonucleotide
ucucuuuacaggcucgggacc

SEQ ID NO: 3144 - RNA, 21 nt, Artificial Sequence
  Description of Artificial Sequence: Synthetic oligonucleotide
ucccgagccuguaaagagaca

SEQ ID NO: 3145 - RNA, 21 nt, Artificial Sequence
  Description of Artificial Sequence: Synthetic oligonucleotide
cucuuuacaggcucgggacca

SEQ ID NO: 3146 - RNA, 21 nt, Artificial Sequence
  Description of Artificial Sequence: Synthetic oligonucleotide
gucccgagccuguaaagagac

SEQ ID NO: 3147 - RNA, 21 nt, Artificial Sequence
  Description of Artificial Sequence: Synthetic oligonucleotide
ucuuuacaggcucgggaccag

SEQ ID NO: 3148 - RNA, 21 nt, Artificial Sequence
  Description of Artificial Sequence: Synthetic oligonucleotide
ggucccgagccuguaaagaga

SEQ ID NO: 3149 - RNA, 21 nt, Artificial Sequence
  Description of Artificial Sequence: Synthetic oligonucleotide
cuuuacaggcucgggaccagg

SEQ ID NO: 3150 - RNA, 21 nt, Artificial Sequence
  Description of Artificial Sequence: Synthetic oligonucleotide
uggucccgagccuguaaagag

SEQ ID NO: 3151 - RNA, 21 nt, Artificial Sequence
  Description of Artificial Sequence: Synthetic oligonucleotide
uuuacaggcucgggaccaggu

SEQ ID NO: 3152 - RNA, 21 nt, Artificial Sequence
  Description of Artificial Sequence: Synthetic oligonucleotide
cuggucccgagccuguaaaga

SEQ ID NO: 3153 - RNA, 21 nt, Artificial Sequence
  Description of Artificial Sequence: Synthetic oligonucleotide
uuacaggcucgggaccagguu

SEQ ID NO: 3154 - RNA, 21 nt, Artificial Sequence
  Description of Artificial Sequence: Synthetic oligonucleotide
ccuggucccgagccuguaaag

SEQ ID NO: 3155 - RNA, 21 nt, Artificial Sequence
  Description of Artificial Sequence: Synthetic oligonucleotide
uacaggcucgggaccagguuu

SEQ ID NO: 3156 - RNA, 21 nt, Artificial Sequence
  Description of Artificial Sequence: Synthetic oligonucleotide
accuggucccgagccuguaaa

SEQ ID NO: 3157 - RNA, 21 nt, Artificial Sequence
  Description of Artificial Sequence: Synthetic oligonucleotide
acaggcucgggaccagguuug

SEQ ID NO: 3158 - RNA, 21 nt, Artificial Sequence
  Description of Artificial Sequence: Synthetic oligonucleotide
aaccuggucccgagccuguaa

SEQ ID NO: 3159 - RNA, 21 nt, Artificial Sequence
  Description of Artificial Sequence: Synthetic oligonucleotide
caggcucgggaccagguuugc

SEQ ID NO: 3160 - RNA, 21 nt, Artificial Sequence
  Description of Artificial Sequence: Synthetic oligonucleotide
aaaccuggucccgagccugua

SEQ ID NO: 3161 - RNA, 21 nt, Artificial Sequence
  Description of Artificial Sequence: Synthetic oligonucleotide
aggcucgggaccagguuugcc

SEQ ID NO: 3162 - RNA, 21 nt, Artificial Sequence
  Description of Artificial Sequence: Synthetic oligonucleotide
caaaccuggucccgagccugu

SEQ ID NO: 3163 - RNA, 21 nt, Artificial Sequence
  Description of Artificial Sequence: Synthetic oligonucleotide
ggcucgggaccagguuugcca

SEQ ID NO: 3164 - RNA, 21 nt, Artificial Sequence
  Description of Artificial Sequence: Synthetic oligonucleotide
gcaaaccuggucccgagccug

SEQ ID NO: 3165 - RNA, 21 nt, Artificial Sequence
  Description of Artificial Sequence: Synthetic oligonucleotide
gcucgggaccagguuugccac

SEQ ID NO: 3166 - RNA, 21 nt, Artificial Sequence
  Description of Artificial Sequence: Synthetic oligonucleotide
ggcaaaccuggucccgagccu

SEQ ID NO: 3167 - RNA, 21 nt, Artificial Sequence
  Description of Artificial Sequence: Synthetic oligonucleotide
cucgggaccagguuugccacu

SEQ ID NO: 3168 - RNA, 21 nt, Artificial Sequence
  Description of Artificial Sequence: Synthetic oligonucleotide
uggcaaaccuggucccgagcc

SEQ ID NO: 3169 - RNA, 21 nt, Artificial Sequence
  Description of Artificial Sequence: Synthetic oligonucleotide
ucgggaccagguuugccacuu

SEQ ID NO: 3170 - RNA, 21 nt, Artificial Sequence
  Description of Artificial Sequence: Synthetic oligonucleotide
guggcaaaccuggucccgagc

SEQ ID NO: 3171 - RNA, 21 nt, Artificial Sequence
  Description of Artificial Sequence: Synthetic oligonucleotide
cgggaccagguuugccacuuu

SEQ ID NO: 3172 - RNA, 21 nt, Artificial Sequence
  Description of Artificial Sequence: Synthetic oligonucleotide
aguggcaaaccuggucccgag

SEQ ID NO: 3173 - RNA, 21 nt, Artificial Sequence
  Description of Artificial Sequence: Synthetic oligonucleotide
gggaccagguuugccacuuug

SEQ ID NO: 3174 - RNA, 21 nt, Artificial Sequence
  Description of Artificial Sequence: Synthetic oligonucleotide
aaguggcaaaccuggucccga

SEQ ID NO: 3175 - RNA, 21 nt, Artificial Sequence
  Description of Artificial Sequence: Synthetic oligonucleotide
ggaccagguuugccacuuugu

SEQ ID NO: 3176 - RNA, 21 nt, Artificial Sequence
  Description of Artificial Sequence: Synthetic oligonucleotide
aaaguggcaaaccuggucccg

SEQ ID NO: 3177 - RNA, 21 nt, Artificial Sequence
  Description of Artificial Sequence: Synthetic oligonucleotide
gaccagguuugccacuuuguc

SEQ ID NO: 3178 - RNA, 21 nt, Artificial Sequence
  Description of Artificial Sequence: Synthetic oligonucleotide
caaaguggcaaaccugguccc

SEQ ID NO: 3179 - RNA, 21 nt, Artificial Sequence
  Description of Artificial Sequence: Synthetic oligonucleotide
accagguuugccacuuuguca

SEQ ID NO: 3180 - RNA, 21 nt, Artificial Sequence
  Description of Artificial Sequence: Synthetic oligonucleotide
acaaaguggcaaaccuggucc

SEQ ID NO: 3181 - RNA, 21 nt, Artificial Sequence
  Description of Artificial Sequence: Synthetic oligonucleotide
ccagguuugccacuuugucac

SEQ ID NO: 3182 - RNA, 21 nt, Artificial Sequence
  Description of Artificial Sequence: Synthetic oligonucleotide
gacaaaguggcaaaccugguc

SEQ ID NO: 3183 - RNA, 21 nt, Artificial Sequence
  Description of Artificial Sequence: Synthetic oligonucleotide
cagguuugccacuuugucacc

SEQ ID NO: 3184 - RNA, 21 nt, Artificial Sequence
  Description of Artificial Sequence: Synthetic oligonucleotide
ugacaaaguggcaaaccuggu

SEQ ID NO: 3185 - RNA, 21 nt, Artificial Sequence
  Description of Artificial Sequence: Synthetic oligonucleotide
agguuugccacuuugucacca

SEQ ID NO: 3186 - RNA, 21 nt, Artificial Sequence
  Description of Artificial Sequence: Synthetic oligonucleotide
gugacaaaguggcaaaccugg

SEQ ID NO: 3187 - RNA, 21 nt, Artificial Sequence
  Description of Artificial Sequence: Synthetic oligonucleotide
gguuugccacuuugucaccau

SEQ ID NO: 3188 - RNA, 21 nt, Artificial Sequence
  Description of Artificial Sequence: Synthetic oligonucleotide
ggugacaaaguggcaaaccug

SEQ ID NO: 3189 - RNA, 21 nt, Artificial Sequence
  Description of Artificial Sequence: Synthetic oligonucleotide
guuugccacuuugucaccaug

SEQ ID NO: 3190 - RNA, 21 nt, Artificial Sequence
  Description of Artificial Sequence: Synthetic oligonucleotide
uggugacaaaguggcaaaccu

SEQ ID NO: 3191 - RNA, 21 nt, Artificial Sequence
  Description of Artificial Sequence: Synthetic oligonucleotide
uuugccacuuugucaccaugu

SEQ ID NO: 3192 - RNA, 21 nt, Artificial Sequence
  Description of Artificial Sequence: Synthetic oligonucleotide
auggugacaaaguggcaaacc

SEQ ID NO: 3193 - RNA, 21 nt, Artificial Sequence
  Description of Artificial Sequence: Synthetic oligonucleotide
uugccacuuugucaccaugug

SEQ ID NO: 3194 - RNA, 21 nt, Artificial Sequence
  Description of Artificial Sequence: Synthetic oligonucleotide
cauggugacaaaguggcaaac

SEQ ID NO: 3195 - RNA, 21 nt, Artificial Sequence
  Description of Artificial Sequence: Synthetic oligonucleotide
ugccacuuugucaccaugugu

SEQ ID NO: 3196 - RNA, 21 nt, Artificial Sequence
  Description of Artificial Sequence: Synthetic oligonucleotide
acauggugacaaaguggcaaa

SEQ ID NO: 3197 - RNA, 21 nt, Artificial Sequence
  Description of Artificial Sequence: Synthetic oligonucleotide
gccacuuugucaccaugugua

SEQ ID NO: 3198 - RNA, 21 nt, Artificial Sequence
  Description of Artificial Sequence: Synthetic oligonucleotide
cacauggugacaaaguggcaa

SEQ ID NO: 3199 - RNA, 21 nt, Artificial Sequence
  Description of Artificial Sequence: Synthetic oligonucleotide
ccacuuugucaccauguguau

SEQ ID NO: 3200 - RNA, 21 nt, Artificial Sequence
  Description of Artificial Sequence: Synthetic oligonucleotide
acacauggugacaaaguggca

SEQ ID NO: 3201 - RNA, 21 nt, Artificial Sequence
  Description of Artificial Sequence: Synthetic oligonucleotide
cacuuugucaccauguguauc

SEQ ID NO: 3202 - RNA, 21 nt, Artificial Sequence
  Description of Artificial Sequence: Synthetic oligonucleotide
uacacauggugacaaaguggc

SEQ ID NO: 3203 - RNA, 21 nt, Artificial Sequence
  Description of Artificial Sequence: Synthetic oligonucleotide
acuuugucaccauguguaucu

SEQ ID NO: 3204 - RNA, 21 nt, Artificial Sequence
  Description of Artificial Sequence: Synthetic oligonucleotide
auacacauggugacaaagugg

SEQ ID NO: 3205 - RNA, 21 nt, Artificial Sequence
  Description of Artificial Sequence: Synthetic oligonucleotide
cuuugucaccauguguaucuu

SEQ ID NO: 3206 - RNA, 21 nt, Artificial Sequence
  Description of Artificial Sequence: Synthetic oligonucleotide
gauacacauggugacaaagug

SEQ ID NO: 3207 - RNA, 21 nt, Artificial Sequence
  Description of Artificial Sequence: Synthetic oligonucleotide
uuugucaccauguguaucuuc

SEQ ID NO: 3208 - RNA, 21 nt, Artificial Sequence
  Description of Artificial Sequence: Synthetic oligonucleotide
agauacacauggugacaaagu

SEQ ID NO: 3209 - RNA, 21 nt, Artificial Sequence
  Description of Artificial Sequence: Synthetic oligonucleotide
uugucaccauguguaucuuca

SEQ ID NO: 3210 - RNA, 21 nt, Artificial Sequence
  Description of Artificial Sequence: Synthetic oligonucleotide
aagauacacauggugacaaag

SEQ ID NO: 3211 - RNA, 21 nt, Artificial Sequence
  Description of Artificial Sequence: Synthetic oligonucleotide
ugucaccauguguaucuucac

SEQ ID NO: 3212 - RNA, 21 nt, Artificial Sequence
  Description of Artificial Sequence: Synthetic oligonucleotide
gaagauacacauggugacaaa

SEQ ID NO: 3213 - RNA, 21 nt, Artificial Sequence
  Description of Artificial Sequence: Synthetic oligonucleotide
gucaccauguguaucuucacc

SEQ ID NO: 3214 - RNA, 21 nt, Artificial Sequence
  Description of Artificial Sequence: Synthetic oligonucleotide
ugaagauacacauggugacaa

SEQ ID NO: 3215 - RNA, 21 nt, Artificial Sequence
  Description of Artificial Sequence: Synthetic oligonucleotide
ucaccauguguaucuucaccu

SEQ ID NO: 3216 - RNA, 21 nt, Artificial Sequence
  Description of Artificial Sequence: Synthetic oligonucleotide
gugaagauacacauggugaca

SEQ ID NO: 3217 - RNA, 21 nt, Artificial Sequence
  Description of Artificial Sequence: Synthetic oligonucleotide
caccauguguaucuucaccug

SEQ ID NO: 3218 - RNA, 21 nt, Artificial Sequence
  Description of Artificial Sequence: Synthetic oligonucleotide
ggugaagauacacauggugac

SEQ ID NO: 3219 - RNA, 21 nt, Artificial Sequence
  Description of Artificial Sequence: Synthetic oligonucleotide
accauguguaucuucaccugc

SEQ ID NO: 3220 - RNA, 21 nt, Artificial Sequence
  Description of Artificial Sequence: Synthetic oligonucleotide
aggugaagauacacaugguga

SEQ ID NO: 3221 - RNA, 21 nt, Artificial Sequence
  Description of Artificial Sequence: Synthetic oligonucleotide
ccauguguaucuucaccugca

SEQ ID NO: 3222 - RNA, 21 nt, Artificial Sequence
  Description of Artificial Sequence: Synthetic oligonucleotide
caggugaagauacacauggug

SEQ ID NO: 3223 - RNA, 21 nt, Artificial Sequence
  Description of Artificial Sequence: Synthetic oligonucleotide
cauguguaucuucaccugcac

SEQ ID NO: 3224 - RNA, 21 nt, Artificial Sequence
  Description of Artificial Sequence: Synthetic oligonucleotide
gcaggugaagauacacauggu

SEQ ID NO: 3225 - RNA, 21 nt, Artificial Sequence
  Description of Artificial Sequence: Synthetic oligonucleotide
auguguaucuucaccugcacc

SEQ ID NO: 3226 - RNA, 21 nt, Artificial Sequence
  Description of Artificial Sequence: Synthetic oligonucleotide
ugcaggugaagauacacaugg

SEQ ID NO: 3227 - RNA, 21 nt, Artificial Sequence
  Description of Artificial Sequence: Synthetic oligonucleotide
uguguaucuucaccugcaccg

SEQ ID NO: 3228 - RNA, 21 nt, Artificial Sequence
  Description of Artificial Sequence: Synthetic oligonucleotide
gugcaggugaagauacacaug

SEQ ID NO: 3229 - RNA, 21 nt, Artificial Sequence
  Description of Artificial Sequence: Synthetic oligonucleotide
guguaucuucaccugcaccgg

SEQ ID NO: 3230 - RNA, 21 nt, Artificial Sequence
  Description of Artificial Sequence: Synthetic oligonucleotide
ggugcaggugaagauacacau

SEQ ID NO: 3231 - RNA, 21 nt, Artificial Sequence
  Description of Artificial Sequence: Synthetic oligonucleotide
uguaucuucaccugcaccggc

SEQ ID NO: 3232 - RNA, 21 nt, Artificial Sequence
  Description of Artificial Sequence: Synthetic oligonucleotide
cggugcaggugaagauacaca

SEQ ID NO: 3233 - RNA, 21 nt, Artificial Sequence
  Description of Artificial Sequence: Synthetic oligonucleotide
guaucuucaccugcaccggcc

SEQ ID NO: 3234 - RNA, 21 nt, Artificial Sequence
  Description of Artificial Sequence: Synthetic oligonucleotide
ccggugcaggugaagauacac

SEQ ID NO: 3235 - RNA, 21 nt, Artificial Sequence
  Description of Artificial Sequence: Synthetic oligonucleotide
uaucuucaccugcaccggcca

SEQ ID NO: 3236 - RNA, 21 nt, Artificial Sequence
  Description of Artificial Sequence: Synthetic oligonucleotide
gccggugcaggugaagauaca

SEQ ID NO: 3237 - RNA, 21 nt, Artificial Sequence
  Description of Artificial Sequence: Synthetic oligonucleotide
aucuucaccugcaccggccaa

SEQ ID NO: 3238 - RNA, 21 nt, Artificial Sequence
  Description of Artificial Sequence: Synthetic oligonucleotide
ggccggugcaggugaagauac

SEQ ID NO: 3239 - RNA, 21 nt, Artificial Sequence
  Description of Artificial Sequence: Synthetic oligonucleotide
ucuucaccugcaccggccaac

SEQ ID NO: 3240 - RNA, 21 nt, Artificial Sequence
  Description of Artificial Sequence: Synthetic oligonucleotide
uggccggugcaggugaagaua

SEQ ID NO: 3241 - RNA, 21 nt, Artificial Sequence
  Description of Artificial Sequence: Synthetic oligonucleotide
cuucaccugcaccggccaaca

SEQ ID NO: 3242 - RNA, 21 nt, Artificial Sequence
  Description of Artificial Sequence: Synthetic oligonucleotide
uuggccggugcaggugaagau

SEQ ID NO: 3243 - RNA, 21 nt, Artificial Sequence
  Description of Artificial Sequence: Synthetic oligonucleotide
uucaccugcaccggccaacac

SEQ ID NO: 3244 - RNA, 21 nt, Artificial Sequence
  Description of Artificial Sequence: Synthetic oligonucleotide
guuggccggugcaggugaaga

SEQ ID NO: 3245 - RNA, 21 nt, Artificial Sequence
  Description of Artificial Sequence: Synthetic oligonucleotide
ucaccugcaccggccaacacg

SEQ ID NO: 3246 - RNA, 21 nt, Artificial Sequence
  Description of Artificial Sequence: Synthetic oligonucleotide
uguuggccggugcaggugaag

SEQ ID NO: 3247 - RNA, 21 nt, Artificial Sequence
  Description of Artificial Sequence: Synthetic oligonucleotide
caccugcaccggccaacacgc

SEQ ID NO: 3248 - RNA, 21 nt, Artificial Sequence
  Description of Artificial Sequence: Synthetic oligonucleotide
guguuggccggugcaggugaa

SEQ ID NO: 3249 - RNA, 21 nt, Artificial Sequence
  Description of Artificial Sequence: Synthetic oligonucleotide
accugcaccggccaacacgcc

SEQ ID NO: 3250 - RNA, 21 nt, Artificial Sequence
  Description of Artificial Sequence: Synthetic oligonucleotide
cguguuggccggugcagguga

SEQ ID NO: 3251 - RNA, 21 nt, Artificial Sequence
  Description of Artificial Sequence: Synthetic oligonucleotide
ccugcaccggccaacacgccu

SEQ ID NO: 3252 - RNA, 21 nt, Artificial Sequence
  Description of Artificial Sequence: Synthetic oligonucleotide
gcguguuggccggugcaggug

SEQ ID NO: 3253 - RNA, 21 nt, Artificial Sequence
  Description of Artificial Sequence: Synthetic oligonucleotide
cugcaccggccaacacgccuc

SEQ ID NO: 3254 - RNA, 21 nt, Artificial Sequence
  Description of Artificial Sequence: Synthetic oligonucleotide
ggcguguuggccggugcaggu

SEQ ID NO: 3255 - RNA, 21 nt, Artificial Sequence
  Description of Artificial Sequence: Synthetic oligonucleotide
ugcaccggccaacacgccucu

SEQ ID NO: 3256 - RNA, 21 nt, Artificial Sequence
  Description of Artificial Sequence: Synthetic oligonucleotide
aggcguguuggccggugcagg

SEQ ID NO: 3257 - RNA, 21 nt, Artificial Sequence
  Description of Artificial Sequence: Synthetic oligonucleotide
gcaccggccaacacgccucug

SEQ ID NO: 3258 - RNA, 21 nt, Artificial Sequence
  Description of Artificial Sequence: Synthetic oligonucleotide
gaggcguguuggccggugcag

SEQ ID NO: 3259 - RNA, 21 nt, Artificial Sequence
  Description of Artificial Sequence: Synthetic oligonucleotide
caccggccaacacgccucugu

SEQ ID NO: 3260 - RNA, 21 nt, Artificial Sequence
  Description of Artificial Sequence: Synthetic oligonucleotide
agaggcguguuggccggugca

SEQ ID NO: 3261 - RNA, 21 nt, Artificial Sequence
  Description of Artificial Sequence: Synthetic oligonucleotide
accggccaacacgccucugug

SEQ ID NO: 3262 - RNA, 21 nt, Artificial Sequence
  Description of Artificial Sequence: Synthetic oligonucleotide
cagaggcguguuggccggugc

SEQ ID NO: 3263 - RNA, 21 nt, Artificial Sequence
  Description of Artificial Sequence: Synthetic oligonucleotide
ccggccaacacgccucugugc

SEQ ID NO: 3264 - RNA, 21 nt, Artificial Sequence
  Description of Artificial Sequence: Synthetic oligonucleotide
acagaggcguguuggccggug

SEQ ID NO: 3265 - RNA, 21 nt, Artificial Sequence
  Description of Artificial Sequence: Synthetic oligonucleotide
cggccaacacgccucugugca

SEQ ID NO: 3266 - RNA, 21 nt, Artificial Sequence
  Description of Artificial Sequence: Synthetic oligonucleotide
cacagaggcguguuggccggu

SEQ ID NO: 3267 - RNA, 21 nt, Artificial Sequence
  Description of Artificial Sequence: Synthetic oligonucleotide
ggccaacacgccucugugcac

SEQ ID NO: 3268 - RNA, 21 nt, Artificial Sequence
  Description of Artificial Sequence: Synthetic oligonucleotide
gcacagaggcguguuggccgg

SEQ ID NO: 3269 - RNA, 21 nt, Artificial Sequence
  Description of Artificial Sequence: Synthetic oligonucleotide
gccaacacgccucugugcacc

SEQ ID NO: 3270 - RNA, 21 nt, Artificial Sequence
  Description of Artificial Sequence: Synthetic oligonucleotide
ugcacagaggcguguuggccg

SEQ ID NO: 3271 - RNA, 21 nt, Artificial Sequence
  Description of Artificial Sequence: Synthetic oligonucleotide
ccaacacgccucugugcaccu

SEQ ID NO: 3272 - RNA, 21 nt, Artificial Sequence
  Description of Artificial Sequence: Synthetic oligonucleotide
gugcacagaggcguguuggcc

SEQ ID NO: 3273 - RNA, 21 nt, Artificial Sequence
  Description of Artificial Sequence: Synthetic oligonucleotide
caacacgccucugugcaccug

SEQ ID NO: 3274 - RNA, 21 nt, Artificial Sequence
  Description of Artificial Sequence: Synthetic oligonucleotide
ggugcacagaggcguguuggc

SEQ ID NO: 3275 - RNA, 21 nt, Artificial Sequence
  Description of Artificial Sequence: Synthetic oligonucleotide
aacacgccucugugcaccugg

SEQ ID NO: 3276 - RNA, 21 nt, Artificial Sequence
  Description of Artificial Sequence: Synthetic oligonucleotide
aggugcacagaggcguguugg

SEQ ID NO: 3277 - RNA, 21 nt, Artificial Sequence
  Description of Artificial Sequence: Synthetic oligonucleotide
acacgccucugugcaccuggg

SEQ ID NO: 3278 - RNA, 21 nt, Artificial Sequence
  Description of Artificial Sequence: Synthetic oligonucleotide
caggugcacagaggcguguug

SEQ ID NO: 3279 - RNA, 21 nt, Artificial Sequence
  Description of Artificial Sequence: Synthetic oligonucleotide
cacgccucugugcaccugggc

SEQ ID NO: 3280 - RNA, 21 nt, Artificial Sequence
  Description of Artificial Sequence: Synthetic oligonucleotide
ccaggugcacagaggcguguu

SEQ ID NO: 3281 - RNA, 21 nt, Artificial Sequence
  Description of Artificial Sequence: Synthetic oligonucleotide
acgccucugugcaccugggcc

SEQ ID NO: 3282 - RNA, 21 nt, Artificial Sequence
  Description of Artificial Sequence: Synthetic oligonucleotide
cccaggugcacagaggcgugu

SEQ ID NO: 3283 - RNA, 21 nt, Artificial Sequence
  Description of Artificial Sequence: Synthetic oligonucleotide
cgccucugugcaccugggcca

SEQ ID NO: 3284 - RNA, 21 nt, Artificial Sequence
  Description of Artificial Sequence: Synthetic oligonucleotide
gcccaggugcacagaggcgug

SEQ ID NO: 3285 - RNA, 21 nt, Artificial Sequence
  Description of Artificial Sequence: Synthetic oligonucleotide
gccucugugcaccugggccag

SEQ ID NO: 3286 - RNA, 21 nt, Artificial Sequence
  Description of Artificial Sequence: Synthetic oligonucleotide
ggcccaggugcacagaggcgu

SEQ ID NO: 3287 - RNA, 21 nt, Artificial Sequence
  Description of Artificial Sequence: Synthetic oligonucleotide
ccucugugcaccugggccagc

SEQ ID NO: 3288 - RNA, 21 nt, Artificial Sequence
  Description of Artificial Sequence: Synthetic oligonucleotide
uggcccaggugcacagaggcg

SEQ ID NO: 3289 - RNA, 21 nt, Artificial Sequence
  Description of Artificial Sequence: Synthetic oligonucleotide
cucugugcaccugggccagcu

SEQ ID NO: 3290 - RNA, 21 nt, Artificial Sequence
  Description of Artificial Sequence: Synthetic oligonucleotide
cuggcccaggugcacagaggc

SEQ ID NO: 3291 - RNA, 21 nt, Artificial Sequence
  Description of Artificial Sequence: Synthetic oligonucleotide
ucugugcaccugggccagcug

SEQ ID NO: 3292 - RNA, 21 nt, Artificial Sequence
  Description of Artificial Sequence: Synthetic oligonucleotide
gcuggcccaggugcacagagg

SEQ ID NO: 3293 - RNA, 21 nt, Artificial Sequence
  Description of Artificial Sequence: Synthetic oligonucleotide
cugugcaccugggccagcugg

SEQ ID NO: 3294 - RNA, 21 nt, Artificial Sequence
  Description of Artificial Sequence: Synthetic oligonucleotide
agcuggcccaggugcacagag

SEQ ID NO: 3295 - RNA, 21 nt, Artificial Sequence
  Description of Artificial Sequence: Synthetic oligonucleotide
ugugcaccugggccagcugga

SEQ ID NO: 3296 - RNA, 21 nt, Artificial Sequence
  Description of Artificial Sequence: Synthetic oligonucleotide
cagcuggcccaggugcacaga

SEQ ID NO: 3297 - RNA, 21 nt, Artificial Sequence
  Description of Artificial Sequence: Synthetic oligonucleotide
gugcaccugggccagcuggac

SEQ ID NO: 3298 - RNA, 21 nt, Artificial Sequence
  Description of Artificial Sequence: Synthetic oligonucleotide
ccagcuggcccaggugcacag

SEQ ID NO: 3299 - RNA, 21 nt, Artificial Sequence
  Description of Artificial Sequence: Synthetic oligonucleotide
ugcaccugggccagcuggacu

SEQ ID NO: 3300 - RNA, 21 nt, Artificial Sequence
  Description of Artificial Sequence: Synthetic oligonucleotide
uccagcuggcccaggugcaca

SEQ ID NO: 3301 - RNA, 21 nt, Artificial Sequence
  Description of Artificial Sequence: Synthetic oligonucleotide
gcaccugggccagcuggacug

SEQ ID NO: 3302 - RNA, 21 nt, Artificial Sequence
  Description of Artificial Sequence: Synthetic oligonucleotide
guccagcuggcccaggugcac

SEQ ID NO: 3303 - RNA, 21 nt, Artificial Sequence
  Description of Artificial Sequence: Synthetic oligonucleotide
caccugggccagcuggacugg

SEQ ID NO: 3304 - RNA, 21 nt, Artificial Sequence
  Description of Artificial Sequence: Synthetic oligonucleotide
aguccagcuggcccaggugca

SEQ ID NO: 3305 - RNA, 21 nt, Artificial Sequence
  Description of Artificial Sequence: Synthetic oligonucleotide
accugggccagcuggacuggu

SEQ ID NO: 3306 - RNA, 21 nt, Artificial Sequence
  Description of Artificial Sequence: Synthetic oligonucleotide
caguccagcuggcccaggugc

SEQ ID NO: 3307 - RNA, 21 nt, Artificial Sequence
  Description of Artificial Sequence: Synthetic oligonucleotide
ccugggccagcuggacuggua

SEQ ID NO: 3308 - RNA, 21 nt, Artificial Sequence
  Description of Artificial Sequence: Synthetic oligonucleotide
ccaguccagcuggcccaggug

SEQ ID NO: 3309 - RNA, 21 nt, Artificial Sequence
  Description of Artificial Sequence: Synthetic oligonucleotide
cugggccagcuggacugguac

SEQ ID NO: 3310 - RNA, 21 nt, Artificial Sequence
  Description of Artificial Sequence: Synthetic oligonucleotide
accaguccagcuggcccaggu

SEQ ID NO: 3311 - RNA, 21 nt, Artificial Sequence
  Description of Artificial Sequence: Synthetic oligonucleotide
ugggccagcuggacugguacu

SEQ ID NO: 3312 - RNA, 21 nt, Artificial Sequence
  Description of Artificial Sequence: Synthetic oligonucleotide
uaccaguccagcuggcccagg

SEQ ID NO: 3313 - RNA, 21 nt, Artificial Sequence
  Description of Artificial Sequence: Synthetic oligonucleotide
gggccagcuggacugguacuc

SEQ ID NO: 3314 - RNA, 21 nt, Artificial Sequence
  Description of Artificial Sequence: Synthetic oligonucleotide
guaccaguccagcuggcccag

SEQ ID NO: 3315 - RNA, 21 nt, Artificial Sequence
  Description of Artificial Sequence: Synthetic oligonucleotide
ggccagcuggacugguacucu

SEQ ID NO: 3316 - RNA, 21 nt, Artificial Sequence
  Description of Artificial Sequence: Synthetic oligonucleotide
aguaccaguccagcuggccca

SEQ ID NO: 3317 - RNA, 21 nt, Artificial Sequence
  Description of Artificial Sequence: Synthetic oligonucleotide
gccagcuggacugguacucuu

SEQ ID NO: 3318 - RNA, 21 nt, Artificial Sequence
  Description of Artificial Sequence: Synthetic oligonucleotide
gaguaccaguccagcuggccc

SEQ ID NO: 3319 - RNA, 21 nt, Artificial Sequence
  Description of Artificial Sequence: Synthetic oligonucleotide
ccagcuggacugguacucuug

SEQ ID NO: 3320 - RNA, 21 nt, Artificial Sequence
  Description of Artificial Sequence: Synthetic oligonucleotide
agaguaccaguccagcuggcc

SEQ ID NO: 3321 - RNA, 21 nt, Artificial Sequence
  Description of Artificial Sequence: Synthetic oligonucleotide
cagcuggacugguacucuugg

SEQ ID NO: 3322 - RNA, 21 nt, Artificial Sequence
  Description of Artificial Sequence: Synthetic oligonucleotide
aagaguaccaguccagcuggc

SEQ ID NO: 3323 - RNA, 21 nt, Artificial Sequence
  Description of Artificial Sequence: Synthetic oligonucleotide
agcuggacugguacucuuggg

SEQ ID NO: 3324 - RNA, 21 nt, Artificial Sequence
  Description of Artificial Sequence: Synthetic oligonucleotide
caagaguaccaguccagcugg

SEQ ID NO: 3325 - RNA, 21 nt, Artificial Sequence
  Description of Artificial Sequence: Synthetic oligonucleotide
gcuggacugguacucuugggu

SEQ ID NO: 3326 - RNA, 21 nt, Artificial Sequence
  Description of Artificial Sequence: Synthetic oligonucleotide
ccaagaguaccaguccagcug

SEQ ID NO: 3327 - RNA, 21 nt, Artificial Sequence
  Description of Artificial Sequence: Synthetic oligonucleotide
cuggacugguacucuugggug

SEQ ID NO: 3328 - RNA, 21 nt, Artificial Sequence
  Description of Artificial Sequence: Synthetic oligonucleotide
cccaagaguaccaguccagcu

SEQ ID NO: 3329 - RNA, 21 nt, Artificial Sequence
  Description of Artificial Sequence: Synthetic oligonucleotide
uggacugguacucuugggugc

SEQ ID NO: 3330 - RNA, 21 nt, Artificial Sequence
  Description of Artificial Sequence: Synthetic oligonucleotide
acccaagaguaccaguccagc

SEQ ID NO: 3331 - RNA, 21 nt, Artificial Sequence
  Description of Artificial Sequence: Synthetic oligonucleotide
ggacugguacucuugggugcc

SEQ ID NO: 3332 - RNA, 21 nt, Artificial Sequence
  Description of Artificial Sequence: Synthetic oligonucleotide
cacccaagaguaccaguccag

SEQ ID NO: 3333 - RNA, 21 nt, Artificial Sequence
  Description of Artificial Sequence: Synthetic oligonucleotide
gacugguacucuugggugccu

SEQ ID NO: 3334 - RNA, 21 nt, Artificial Sequence
  Description of Artificial Sequence: Synthetic oligonucleotide
gcacccaagaguaccagucca

SEQ ID NO: 3335 - RNA, 21 nt, Artificial Sequence
  Description of Artificial Sequence: Synthetic oligonucleotide
acugguacucuugggugccua

SEQ ID NO: 3336 - RNA, 21 nt, Artificial Sequence
  Description of Artificial Sequence: Synthetic oligonucleotide
ggcacccaagaguaccagucc

SEQ ID NO: 3337 - RNA, 21 nt, Artificial Sequence
  Description of Artificial Sequence: Synthetic oligonucleotide
cugguacucuugggugccuaa

SEQ ID NO: 3338 - RNA, 21 nt, Artificial Sequence
  Description of Artificial Sequence: Synthetic oligonucleotide
aggcacccaagaguaccaguc

SEQ ID NO: 3339 - RNA, 21 nt, Artificial Sequence
  Description of Artificial Sequence: Synthetic oligonucleotide
ugguacucuugggugccuaau

SEQ ID NO: 3340 - RNA, 21 nt, Artificial Sequence
  Description of Artificial Sequence: Synthetic oligonucleotide
uaggcacccaagaguaccagu

SEQ ID NO: 3341 - RNA, 21 nt, Artificial Sequence
  Description of Artificial Sequence: Synthetic oligonucleotide
gguacucuugggugccuaaug

SEQ ID NO: 3342 - RNA, 21 nt, Artificial Sequence
  Description of Artificial Sequence: Synthetic oligonucleotide
uuaggcacccaagaguaccag

SEQ ID NO: 3343 - RNA, 21 nt, Artificial Sequence
  Description of Artificial Sequence: Synthetic oligonucleotide
guacucuugggugccuaaugc

SEQ ID NO: 3344 - RNA, 21 nt, Artificial Sequence
  Description of Artificial Sequence: Synthetic oligonucleotide
auuaggcacccaagaguacca

SEQ ID NO: 3345 - RNA, 21 nt, Artificial Sequence
  Description of Artificial Sequence: Synthetic oligonucleotide
uacucuugggugccuaaugca

SEQ ID NO: 3346 - RNA, 21 nt, Artificial Sequence
  Description of Artificial Sequence: Synthetic oligonucleotide
cauuaggcacccaagaguacc

SEQ ID NO: 3347 - RNA, 21 nt, Artificial Sequence
  Description of Artificial Sequence: Synthetic oligonucleotide
acucuugggugccuaaugcac

SEQ ID NO: 3348 - RNA, 21 nt, Artificial Sequence
  Description of Artificial Sequence: Synthetic oligonucleotide
gcauuaggcacccaagaguac

SEQ ID NO: 3349 - RNA, 21 nt, Artificial Sequence
  Description of Artificial Sequence: Synthetic oligonucleotide
cucuugggugccuaaugcacc

SEQ ID NO: 3350 - RNA, 21 nt, Artificial Sequence
  Description of Artificial Sequence: Synthetic oligonucleotide
ugcauuaggcacccaagagua

SEQ ID NO: 3351 - RNA, 21 nt, Artificial Sequence
  Description of Artificial Sequence: Synthetic oligonucleotide
ucuugggugccuaaugcaccc

SEQ ID NO: 3352 - RNA, 21 nt, Artificial Sequence
  Description of Artificial Sequence: Synthetic oligonucleotide
gugcauuaggcacccaagagu

SEQ ID NO: 3353 - RNA, 21 nt, Artificial Sequence
  Description of Artificial Sequence: Synthetic oligonucleotide
cuugggugccuaaugcacccu

SEQ ID NO: 3354 - RNA, 21 nt, Artificial Sequence
  Description of Artificial Sequence: Synthetic oligonucleotide
ggugcauuaggcacccaagag

SEQ ID NO: 3355 - RNA, 21 nt, Artificial Sequence
  Description of Artificial Sequence: Synthetic oligonucleotide
uugggugccuaaugcacccug

SEQ ID NO: 3356 - RNA, 21 nt, Artificial Sequence
  Description of Artificial Sequence: Synthetic oligonucleotide
gggugcauuaggcacccaaga

SEQ ID NO: 3357 - RNA, 21 nt, Artificial Sequence
  Description of Artificial Sequence: Synthetic oligonucleotide
ugggugccuaaugcacccugc

SEQ ID NO: 3358 - RNA, 21 nt, Artificial Sequence
  Description of Artificial Sequence: Synthetic oligonucleotide
agggugcauuaggcacccaag

SEQ ID NO: 3359 - RNA, 21 nt, Artificial Sequence
  Description of Artificial Sequence: Synthetic oligonucleotide
gggugccuaaugcacccugca

SEQ ID NO: 3360 - RNA, 21 nt, Artificial Sequence
  Description of Artificial Sequence: Synthetic oligonucleotide
cagggugcauuaggcacccaa

SEQ ID NO: 3361 - RNA, 21 nt, Artificial Sequence
  Description of Artificial Sequence: Synthetic oligonucleotide
ggugccuaaugcacccugcac

SEQ ID NO: 3362 - RNA, 21 nt, Artificial Sequence
  Description of Artificial Sequence: Synthetic oligonucleotide
gcagggugcauuaggcaccca

SEQ ID NO: 3363 - RNA, 21 nt, Artificial Sequence
  Description of Artificial Sequence: Synthetic oligonucleotide
gugccuaaugcacccugcacg

SEQ ID NO: 3364 - RNA, 21 nt, Artificial Sequence
  Description of Artificial Sequence: Synthetic oligonucleotide
ugcagggugcauuaggcaccc

SEQ ID NO: 3365 - RNA, 21 nt, Artificial Sequence
  Description of Artificial Sequence: Synthetic oligonucleotide
ugccuaaugcacccugcacga

SEQ ID NO: 3366 - RNA, 21 nt, Artificial Sequence
  Description of Artificial Sequence: Synthetic oligonucleotide
gugcagggugcauuaggcacc

SEQ ID NO: 3367 - RNA, 21 nt, Artificial Sequence
  Description of Artificial Sequence: Synthetic oligonucleotide
gccuaaugcacccugcacgau

SEQ ID NO: 3368 - RNA, 21 nt, Artificial Sequence
  Description of Artificial Sequence: Synthetic oligonucleotide
cgugcagggugcauuaggcac

SEQ ID NO: 3369 - RNA, 21 nt, Artificial Sequence
  Description of Artificial Sequence: Synthetic oligonucleotide
ccuaaugcacccugcacgaug

SEQ ID NO: 3370 - RNA, 21 nt, Artificial Sequence
  Description of Artificial Sequence: Synthetic oligonucleotide
ucgugcagggugcauuaggca

SEQ ID NO: 3371 - RNA, 21 nt, Artificial Sequence
  Description of Artificial Sequence: Synthetic oligonucleotide
cuaaugcacccugcacgaugc

SEQ ID NO: 3372 - RNA, 21 nt, Artificial Sequence
  Description of Artificial Sequence: Synthetic oligonucleotide
aucgugcagggugcauuaggc

SEQ ID NO: 3373 - RNA, 21 nt, Artificial Sequence
  Description of Artificial Sequence: Synthetic oligonucleotide
uaaugcacccugcacgaugcg

SEQ ID NO: 3374 - RNA, 21 nt, Artificial Sequence
  Description of Artificial Sequence: Synthetic oligonucleotide
caucgugcagggugcauuagg

SEQ ID NO: 3375 - RNA, 21 nt, Artificial Sequence
  Description of Artificial Sequence: Synthetic oligonucleotide
aaugcacccugcacgaugcgg

SEQ ID NO: 3376 - RNA, 21 nt, Artificial Sequence
  Description of Artificial Sequence: Synthetic oligonucleotide
gcaucgugcagggugcauuag

SEQ ID NO: 3377 - RNA, 21 nt, Artificial Sequence
  Description of Artificial Sequence: Synthetic oligonucleotide
augcacccugcacgaugcggc

SEQ ID NO: 3378 - RNA, 21 nt, Artificial Sequence
  Description of Artificial Sequence: Synthetic oligonucleotide
cgcaucgugcagggugcauua

SEQ ID NO: 3379 - RNA, 21 nt, Artificial Sequence
  Description of Artificial Sequence: Synthetic oligonucleotide
ugcacccugcacgaugcggcu

SEQ ID NO: 3380 - RNA, 21 nt, Artificial Sequence
  Description of Artificial Sequence: Synthetic oligonucleotide
ccgcaucgugcagggugcauu

SEQ ID NO: 3381 - RNA, 21 nt, Artificial Sequence
  Description of Artificial Sequence: Synthetic oligonucleotide
gcacccugcacgaugcggcug

SEQ ID NO: 3382 - RNA, 21 nt, Artificial Sequence
  Description of Artificial Sequence: Synthetic oligonucleotide
gccgcaucgugcagggugcau

SEQ ID NO: 3383 - RNA, 21 nt, Artificial Sequence
  Description of Artificial Sequence: Synthetic oligonucleotide
cacccugcacgaugcggcugc

SEQ ID NO: 3384 - RNA, 21 nt, Artificial Sequence
  Description of Artificial Sequence: Synthetic oligonucleotide
agccgcaucgugcagggugca

SEQ ID NO: 3385 - RNA, 21 nt, Artificial Sequence
  Description of Artificial Sequence: Synthetic oligonucleotide
acccugcacgaugcggcugcc

SEQ ID NO: 3386 - RNA, 21 nt, Artificial Sequence
  Description of Artificial Sequence: Synthetic oligonucleotide
cagccgcaucgugcagggugc

SEQ ID NO: 3387 - RNA, 21 nt, Artificial Sequence
  Description of Artificial Sequence: Synthetic oligonucleotide
cccugcacgaugcggcugccc

SEQ ID NO: 3388 - RNA, 21 nt, Artificial Sequence
  Description of Artificial Sequence: Synthetic oligonucleotide
gcagccgcaucgugcagggug

SEQ ID NO: 3389 - RNA, 21 nt, Artificial Sequence
  Description of Artificial Sequence: Synthetic oligonucleotide
ccugcacgaugcggcugcccc

SEQ ID NO: 3390 - RNA, 21 nt, Artificial Sequence
  Description of Artificial Sequence: Synthetic oligonucleotide
ggcagccgcaucgugcagggu

SEQ ID NO: 3391 - RNA, 21 nt, Artificial Sequence
  Description of Artificial Sequence: Synthetic oligonucleotide
cugcacgaugcggcugccccc

SEQ ID NO: 3392 - RNA, 21 nt, Artificial Sequence
  Description of Artificial Sequence: Synthetic oligonucleotide
gggcagccgcaucgugcaggg

SEQ ID NO: 3393 - RNA, 21 nt, Artificial Sequence
  Description of Artificial Sequence: Synthetic oligonucleotide
ugcacgaugcggcugcccccg

SEQ ID NO: 3394 - RNA, 21 nt, Artificial Sequence
  Description of Artificial Sequence: Synthetic oligonucleotide
ggggcagccgcaucgugcagg

SEQ ID NO: 3395 - RNA, 21 nt, Artificial Sequence
  Description of Artificial Sequence: Synthetic oligonucleotide
gcacgaugcggcugcccccgc

SEQ ID NO: 3396 - RNA, 21 nt, Artificial Sequence
  Description of Artificial Sequence: Synthetic oligonucleotide
gggggcagccgcaucgugcag

SEQ ID NO: 3397 - RNA, 21 nt, Artificial Sequence
  Description of Artificial Sequence: Synthetic oligonucleotide
cacgaugcggcugcccccgcc

SEQ ID NO: 3398 - RNA, 21 nt, Artificial Sequence
  Description of Artificial Sequence: Synthetic oligonucleotide
cgggggcagccgcaucgugca

SEQ ID NO: 3399 - RNA, 21 nt, Artificial Sequence
  Description of Artificial Sequence: Synthetic oligonucleotide
acgaugcggcugcccccgcca

SEQ ID NO: 3400 - RNA, 21 nt, Artificial Sequence
  Description of Artificial Sequence: Synthetic oligonucleotide
gcgggggcagccgcaucgugc

SEQ ID NO: 3401 - RNA, 21 nt, Artificial Sequence
  Description of Artificial Sequence: Synthetic oligonucleotide
cgaugcggcugcccccgccaa

SEQ ID NO: 3402 - RNA, 21 nt, Artificial Sequence
  Description of Artificial Sequence: Synthetic oligonucleotide
ggcgggggcagccgcaucgug

SEQ ID NO: 3403 - RNA, 21 nt, Artificial Sequence
  Description of Artificial Sequence: Synthetic oligonucleotide
gaugcggcugcccccgccaac

SEQ ID NO: 3404 - RNA, 21 nt, Artificial Sequence
  Description of Artificial Sequence: Synthetic oligonucleotide
uggcgggggcagccgcaucgu

SEQ ID NO: 3405 - RNA, 21 nt, Artificial Sequence
  Description of Artificial Sequence: Synthetic oligonucleotide
augcggcugcccccgccaacc

SEQ ID NO: 3406 - RNA, 21 nt, Artificial Sequence
  Description of Artificial Sequence: Synthetic oligonucleotide
uuggcgggggcagccgcaucg

SEQ ID NO: 3407 - RNA, 21 nt, Artificial Sequence
  Description of Artificial Sequence: Synthetic oligonucleotide
ugcggcugcccccgccaacca

SEQ ID NO: 3408 - RNA, 21 nt, Artificial Sequence
  Description of Artificial Sequence: Synthetic oligonucleotide
guuggcgggggcagccgcauc

SEQ ID NO: 3409 - RNA, 21 nt, Artificial Sequence
  Description of Artificial Sequence: Synthetic oligonucleotide
gcggcugcccccgccaaccac

SEQ ID NO: 3410 - RNA, 21 nt, Artificial Sequence
  Description of Artificial Sequence: Synthetic oligonucleotide
gguuggcgggggcagccgcau

SEQ ID NO: 3411 - RNA, 21 nt, Artificial Sequence
  Description of Artificial Sequence: Synthetic oligonucleotide
cggcugcccccgccaaccacc

SEQ ID NO: 3412 - RNA, 21 nt, Artificial Sequence
  Description of Artificial Sequence: Synthetic oligonucleotide
ugguuggcgggggcagccgca

SEQ ID NO: 3413 - RNA, 21 nt, Artificial Sequence
  Description of Artificial Sequence: Synthetic oligonucleotide
ggcugcccccgccaaccacca

SEQ ID NO: 3414 - RNA, 21 nt, Artificial Sequence
  Description of Artificial Sequence: Synthetic oligonucleotide
gugguuggcgggggcagccgc

SEQ ID NO: 3415 - RNA, 21 nt, Artificial Sequence
  Description of Artificial Sequence: Synthetic oligonucleotide
gcugcccccgccaaccaccaa

SEQ ID NO: 3416 - RNA, 21 nt, Artificial Sequence
  Description of Artificial Sequence: Synthetic oligonucleotide
ggugguuggcgggggcagccg

SEQ ID NO: 3417 - RNA, 21 nt, Artificial Sequence
  Description of Artificial Sequence: Synthetic oligonucleotide
cugcccccgccaaccaccaag

SEQ ID NO: 3418 - RNA, 21 nt, Artificial Sequence
  Description of Artificial Sequence: Synthetic oligonucleotide
uggugguuggcgggggcagcc

SEQ ID NO: 3419 - RNA, 21 nt, Artificial Sequence
  Description of Artificial Sequence: Synthetic oligonucleotide
ugcccccgccaaccaccaagg

SEQ ID NO: 3420 - RNA, 21 nt, Artificial Sequence
  Description of Artificial Sequence: Synthetic oligonucleotide
uuggugguuggcgggggcagc

SEQ ID NO: 3421 - RNA, 21 nt, Artificial Sequence
  Description of Artificial Sequence: Synthetic oligonucleotide
gcccccgccaaccaccaagga

SEQ ID NO: 3422 - RNA, 21 nt, Artificial Sequence
  Description of Artificial Sequence: Synthetic oligonucleotide
cuuggugguuggcgggggcag

SEQ ID NO: 3423 - RNA, 21 nt, Artificial Sequence
  Description of Artificial Sequence: Synthetic oligonucleotide
cccccgccaaccaccaaggau

SEQ ID NO: 3424 - RNA, 21 nt, Artificial Sequence
  Description of Artificial Sequence: Synthetic oligonucleotide
ccuuggugguuggcgggggca

SEQ ID NO: 3425 - RNA, 21 nt, Artificial Sequence
  Description of Artificial Sequence: Synthetic oligonucleotide
ccccgccaaccaccaaggaug

SEQ ID NO: 3426 - RNA, 21 nt, Artificial Sequence
  Description of Artificial Sequence: Synthetic oligonucleotide
uccuuggugguuggcgggggc

SEQ ID NO: 3427 - RNA, 21 nt, Artificial Sequence
  Description of Artificial Sequence: Synthetic oligonucleotide
cccgccaaccaccaaggaugc

SEQ ID NO: 3428 - RNA, 21 nt, Artificial Sequence
  Description of Artificial Sequence: Synthetic oligonucleotide
auccuuggugguuggcggggg

SEQ ID NO: 3429 - RNA, 21 nt, Artificial Sequence
  Description of Artificial Sequence: Synthetic oligonucleotide
ccgccaaccaccaaggaugca

SEQ ID NO: 3430 - RNA, 21 nt, Artificial Sequence
  Description of Artificial Sequence: Synthetic oligonucleotide
cauccuuggugguuggcgggg

SEQ ID NO: 3431 - RNA, 21 nt, Artificial Sequence
  Description of Artificial Sequence: Synthetic oligonucleotide
cgccaaccaccaaggaugcaa

SEQ ID NO: 3432 - RNA, 21 nt, Artificial Sequence
  Description of Artificial Sequence: Synthetic oligonucleotide
gcauccuuggugguuggcggg

SEQ ID NO: 3433 - RNA, 21 nt, Artificial Sequence
  Description of Artificial Sequence: Synthetic oligonucleotide
gccaaccaccaaggaugcaac

SEQ ID NO: 3434 - RNA, 21 nt, Artificial Sequence
  Description of Artificial Sequence: Synthetic oligonucleotide
ugcauccuuggugguuggcgg

SEQ ID NO: 3435 - RNA, 21 nt, Artificial Sequence
  Description of Artificial Sequence: Synthetic oligonucleotide
ccaaccaccaaggaugcaacg

SEQ ID NO: 3436 - RNA, 21 nt, Artificial Sequence
  Description of Artificial Sequence: Synthetic oligonucleotide
uugcauccuuggugguuggcg

SEQ ID NO: 3437 - RNA, 21 nt, Artificial Sequence
  Description of Artificial Sequence: Synthetic oligonucleotide
caaccaccaaggaugcaacgc

SEQ ID NO: 3438 - RNA, 21 nt, Artificial Sequence
  Description of Artificial Sequence: Synthetic oligonucleotide
guugcauccuuggugguuggc

SEQ ID NO: 3439 - RNA, 21 nt, Artificial Sequence
  Description of Artificial Sequence: Synthetic oligonucleotide
aaccaccaaggaugcaacgcu

SEQ ID NO: 3440 - RNA, 21 nt, Artificial Sequence
  Description of Artificial Sequence: Synthetic oligonucleotide
cguugcauccuuggugguugg

SEQ ID NO: 3441 - RNA, 21 nt, Artificial Sequence
  Description of Artificial Sequence: Synthetic oligonucleotide
accaccaaggaugcaacgcug

SEQ ID NO: 3442 - RNA, 21 nt, Artificial Sequence
  Description of Artificial Sequence: Synthetic oligonucleotide
gcguugcauccuuggugguug

SEQ ID NO: 3443 - RNA, 21 nt, Artificial Sequence
  Description of Artificial Sequence: Synthetic oligonucleotide
ccaccaaggaugcaacgcugg

SEQ ID NO: 3444 - RNA, 21 nt, Artificial Sequence
  Description of Artificial Sequence: Synthetic oligonucleotide
agcguugcauccuuggugguu

SEQ ID NO: 3445 - RNA, 21 nt, Artificial Sequence
  Description of Artificial Sequence: Synthetic oligonucleotide
caccaaggaugcaacgcugga

SEQ ID NO: 3446 - RNA, 21 nt, Artificial Sequence
  Description of Artificial Sequence: Synthetic oligonucleotide
cagcguugcauccuugguggu

SEQ ID NO: 3447 - RNA, 21 nt, Artificial Sequence
  Description of Artificial Sequence: Synthetic oligonucleotide
accaaggaugcaacgcuggag

SEQ ID NO: 3448 - RNA, 21 nt, Artificial Sequence
  Description of Artificial Sequence: Synthetic oligonucleotide
ccagcguugcauccuuggugg

SEQ ID NO: 3449 - RNA, 21 nt, Artificial Sequence
  Description of Artificial Sequence: Synthetic oligonucleotide
ccaaggaugcaacgcuggaga

SEQ ID NO: 3450 - RNA, 21 nt, Artificial Sequence
  Description of Artificial Sequence: Synthetic oligonucleotide
uccagcguugcauccuuggug

SEQ ID NO: 3451 - RNA, 21 nt, Artificial Sequence
  Description of Artificial Sequence: Synthetic oligonucleotide
caaggaugcaacgcuggagac

SEQ ID NO: 3452 - RNA, 21 nt, Artificial Sequence
  Description of Artificial Sequence: Synthetic oligonucleotide
cuccagcguugcauccuuggu

SEQ ID NO: 3453 - RNA, 21 nt, Artificial Sequence
  Description of Artificial Sequence: Synthetic oligonucleotide
aaggaugcaacgcuggagaca

SEQ ID NO: 3454 - RNA, 21 nt, Artificial Sequence
  Description of Artificial Sequence: Synthetic oligonucleotide
ucuccagcguugcauccuugg

SEQ ID NO: 3455 - RNA, 21 nt, Artificial Sequence
  Description of Artificial Sequence: Synthetic oligonucleotide
aggaugcaacgcuggagacag

SEQ ID NO: 3456 - RNA, 21 nt, Artificial Sequence
  Description of Artificial Sequence: Synthetic oligonucleotide
gucuccagcguugcauccuug

SEQ ID NO: 3457 - RNA, 21 nt, Artificial Sequence
  Description of Artificial Sequence: Synthetic oligonucleotide
ggaugcaacgcuggagacagu

SEQ ID NO: 3458 - RNA, 21 nt, Artificial Sequence
  Description of Artificial Sequence: Synthetic oligonucleotide
ugucuccagcguugcauccuu

SEQ ID NO: 3459 - RNA, 21 nt, Artificial Sequence
  Description of Artificial Sequence: Synthetic oligonucleotide
gaugcaacgcuggagacagug

SEQ ID NO: 3460 - RNA, 21 nt, Artificial Sequence
  Description of Artificial Sequence: Synthetic oligonucleotide
cugucuccagcguugcauccu

SEQ ID NO: 3461 - RNA, 21 nt, Artificial Sequence
  Description of Artificial Sequence: Synthetic oligonucleotide
augcaacgcuggagacaguga

SEQ ID NO: 3462 - RNA, 21 nt, Artificial Sequence
  Description of Artificial Sequence: Synthetic oligonucleotide
acugucuccagcguugcaucc

SEQ ID NO: 3463 - RNA, 21 nt, Artificial Sequence
  Description of Artificial Sequence: Synthetic oligonucleotide
ugcaacgcuggagacagugau

SEQ ID NO: 3464 - RNA, 21 nt, Artificial Sequence
  Description of Artificial Sequence: Synthetic oligonucleotide
cacugucuccagcguugcauc

SEQ ID NO: 3465 - RNA, 21 nt, Artificial Sequence
  Description of Artificial Sequence: Synthetic oligonucleotide
gcaacgcuggagacagugaug

SEQ ID NO: 3466 - RNA, 21 nt, Artificial Sequence
  Description of Artificial Sequence: Synthetic oligonucleotide
ucacugucuccagcguugcau

SEQ ID NO: 3467 - RNA, 21 nt, Artificial Sequence
  Description of Artificial Sequence: Synthetic oligonucleotide
caacgcuggagacagugaugg

SEQ ID NO: 3468 - RNA, 21 nt, Artificial Sequence
  Description of Artificial Sequence: Synthetic oligonucleotide
aucacugucuccagcguugca

SEQ ID NO: 3469 - RNA, 21 nt, Artificial Sequence
  Description of Artificial Sequence: Synthetic oligonucleotide
aacgcuggagacagugauggc

SEQ ID NO: 3470 - RNA, 21 nt, Artificial Sequence
  Description of Artificial Sequence: Synthetic oligonucleotide
caucacugucuccagcguugc

SEQ ID NO: 3471 - RNA, 21 nt, Artificial Sequence
  Description of Artificial Sequence: Synthetic oligonucleotide
acgcuggagacagugauggcg

SEQ ID NO: 3472 - RNA, 21 nt, Artificial Sequence
  Description of Artificial Sequence: Synthetic oligonucleotide
ccaucacugucuccagcguug

SEQ ID NO: 3473 - RNA, 21 nt, Artificial Sequence
  Description of Artificial Sequence: Synthetic oligonucleotide
cgcuggagacagugauggcga

SEQ ID NO: 3474 - RNA, 21 nt, Artificial Sequence
  Description of Artificial Sequence: Synthetic oligonucleotide
gccaucacugucuccagcguu

SEQ ID NO: 3475 - RNA, 21 nt, Artificial Sequence
  Description of Artificial Sequence: Synthetic oligonucleotide
gcuggagacagugauggcgac

SEQ ID NO: 3476 - RNA, 21 nt, Artificial Sequence
  Description of Artificial Sequence: Synthetic oligonucleotide
cgccaucacugucuccagcgu

SEQ ID NO: 3477 - RNA, 21 nt, Artificial Sequence
  Description of Artificial Sequence: Synthetic oligonucleotide
cuggagacagugauggcgaca

SEQ ID NO: 3478 - RNA, 21 nt, Artificial Sequence
  Description of Artificial Sequence: Synthetic oligonucleotide
ucgccaucacugucuccagcg

SEQ ID NO: 3479 - RNA, 21 nt, Artificial Sequence
  Description of Artificial Sequence: Synthetic oligonucleotide
uggagacagugauggcgacac

SEQ ID NO: 3480 - RNA, 21 nt, Artificial Sequence
  Description of Artificial Sequence: Synthetic oligonucleotide
gucgccaucacugucuccagc

SEQ ID NO: 3481 - RNA, 21 nt, Artificial Sequence
  Description of Artificial Sequence: Synthetic oligonucleotide
ggagacagugauggcgacacu

SEQ ID NO: 3482 - RNA, 21 nt, Artificial Sequence
  Description of Artificial Sequence: Synthetic oligonucleotide
ugucgccaucacugucuccag

SEQ ID NO: 3483 - RNA, 21 nt, Artificial Sequence
  Description of Artificial Sequence: Synthetic oligonucleotide
gagacagugauggcgacacug

SEQ ID NO: 3484 - RNA, 21 nt, Artificial Sequence
  Description of Artificial Sequence: Synthetic oligonucleotide
gugucgccaucacugucucca

SEQ ID NO: 3485 - RNA, 21 nt, Artificial Sequence
  Description of Artificial Sequence: Synthetic oligonucleotide
agacagugauggcgacacugc

SEQ ID NO: 3486 - RNA, 21 nt, Artificial Sequence
  Description of Artificial Sequence: Synthetic oligonucleotide
agugucgccaucacugucucc

SEQ ID NO: 3487 - RNA, 21 nt, Artificial Sequence
  Description of Artificial Sequence: Synthetic oligonucleotide
gacagugauggcgacacugcc

SEQ ID NO: 3488 - RNA, 21 nt, Artificial Sequence
  Description of Artificial Sequence: Synthetic oligonucleotide
cagugucgccaucacugucuc

SEQ ID NO: 3489 - RNA, 21 nt, Artificial Sequence
  Description of Artificial Sequence: Synthetic oligonucleotide
acagugauggcgacacugccc

SEQ ID NO: 3490 - RNA, 21 nt, Artificial Sequence
  Description of Artificial Sequence: Synthetic oligonucleotide
gcagugucgccaucacugucu

SEQ ID NO: 3491 - RNA, 21 nt, Artificial Sequence
  Description of Artificial Sequence: Synthetic oligonucleotide
cagugauggcgacacugccca

SEQ ID NO: 3492 - RNA, 21 nt, Artificial Sequence
  Description of Artificial Sequence: Synthetic oligonucleotide
ggcagugucgccaucacuguc

SEQ ID NO: 3493 - RNA, 21 nt, Artificial Sequence
  Description of Artificial Sequence: Synthetic oligonucleotide
agugauggcgacacugcccaa

SEQ ID NO: 3494 - RNA, 21 nt, Artificial Sequence
  Description of Artificial Sequence: Synthetic oligonucleotide
gggcagugucgccaucacugu

SEQ ID NO: 3495 - RNA, 21 nt, Artificial Sequence
  Description of Artificial Sequence: Synthetic oligonucleotide
gugauggcgacacugcccaac

SEQ ID NO: 3496 - RNA, 21 nt, Artificial Sequence
  Description of Artificial Sequence: Synthetic oligonucleotide
ugggcagugucgccaucacug

SEQ ID NO: 3497 - RNA, 21 nt, Artificial Sequence
  Description of Artificial Sequence: Synthetic oligonucleotide
ugauggcgacacugcccaacu

SEQ ID NO: 3498 - RNA, 21 nt, Artificial Sequence
  Description of Artificial Sequence: Synthetic oligonucleotide
uugggcagugucgccaucacu

SEQ ID NO: 3499 - RNA, 21 nt, Artificial Sequence
  Description of Artificial Sequence: Synthetic oligonucleotide
gauggcgacacugcccaacuu

SEQ ID NO: 3500 - RNA, 21 nt, Artificial Sequence
  Description of Artificial Sequence: Synthetic oligonucleotide
guugggcagugucgccaucac

SEQ ID NO: 3501 - RNA, 21 nt, Artificial Sequence
  Description of Artificial Sequence: Synthetic oligonucleotide
auggcgacacugcccaacuuc

SEQ ID NO: 3502 - RNA, 21 nt, Artificial Sequence
  Description of Artificial Sequence: Synthetic oligonucleotide
aguugggcagugucgccauca

SEQ ID NO: 3503 - RNA, 21 nt, Artificial Sequence
  Description of Artificial Sequence: Synthetic oligonucleotide
uggcgacacugcccaacuucc

SEQ ID NO: 3504 - RNA, 21 nt, Artificial Sequence
  Description of Artificial Sequence: Synthetic oligonucleotide
aaguugggcagugucgccauc

SEQ ID NO: 3505 - RNA, 21 nt, Artificial Sequence
  Description of Artificial Sequence: Synthetic oligonucleotide
ggcgacacugcccaacuucca

SEQ ID NO: 3506 - RNA, 21 nt, Artificial Sequence
  Description of Artificial Sequence: Synthetic oligonucleotide
gaaguugggcagugucgccau

SEQ ID NO: 3507 - RNA, 21 nt, Artificial Sequence
  Description of Artificial Sequence: Synthetic oligonucleotide
gcgacacugcccaacuuccac

SEQ ID NO: 3508 - RNA, 21 nt, Artificial Sequence
  Description of Artificial Sequence: Synthetic oligonucleotide
ggaaguugggcagugucgcca

SEQ ID NO: 3509 - RNA, 21 nt, Artificial Sequence
  Description of Artificial Sequence: Synthetic oligonucleotide
cgacacugcccaacuuccacc

SEQ ID NO: 3510 - RNA, 21 nt, Artificial Sequence
  Description of Artificial Sequence: Synthetic oligonucleotide
uggaaguugggcagugucgcc

SEQ ID NO: 3511 - RNA, 21 nt, Artificial Sequence
  Description of Artificial Sequence: Synthetic oligonucleotide
gacacugcccaacuuccacca

SEQ ID NO: 3512 - RNA, 21 nt, Artificial Sequence
  Description of Artificial Sequence: Synthetic oligonucleotide
guggaaguugggcagugucgc

SEQ ID NO: 3513 - RNA, 21 nt, Artificial Sequence
  Description of Artificial Sequence: Synthetic oligonucleotide
acacugcccaacuuccaccag

SEQ ID NO: 3514 - RNA, 21 nt, Artificial Sequence
  Description of Artificial Sequence: Synthetic oligonucleotide
gguggaaguugggcagugucg

SEQ ID NO: 3515 - RNA, 21 nt, Artificial Sequence
  Description of Artificial Sequence: Synthetic oligonucleotide
cacugcccaacuuccaccagg

SEQ ID NO: 3516 - RNA, 21 nt, Artificial Sequence
  Description of Artificial Sequence: Synthetic oligonucleotide
ugguggaaguugggcaguguc

SEQ ID NO: 3517 - RNA, 21 nt, Artificial Sequence
  Description of Artificial Sequence: Synthetic oligonucleotide
acugcccaacuuccaccaggc

SEQ ID NO: 3518 - RNA, 21 nt, Artificial Sequence
  Description of Artificial Sequence: Synthetic oligonucleotide
cugguggaaguugggcagugu

SEQ ID NO: 3519 - RNA, 21 nt, Artificial Sequence
  Description of Artificial Sequence: Synthetic oligonucleotide
cugcccaacuuccaccaggcu

SEQ ID NO: 3520 - RNA, 21 nt, Artificial Sequence
  Description of Artificial Sequence: Synthetic oligonucleotide
ccugguggaaguugggcagug

SEQ ID NO: 3521 - RNA, 21 nt, Artificial Sequence
  Description of Artificial Sequence: Synthetic oligonucleotide
ugcccaacuuccaccaggcuu

SEQ ID NO: 3522 - RNA, 21 nt, Artificial Sequence
  Description of Artificial Sequence: Synthetic oligonucleotide
gccugguggaaguugggcagu

SEQ ID NO: 3523 - RNA, 21 nt, Artificial Sequence
  Description of Artificial Sequence: Synthetic oligonucleotide
gcccaacuuccaccaggcuuc

SEQ ID NO: 3524 - RNA, 21 nt, Artificial Sequence
  Description of Artificial Sequence: Synthetic oligonucleotide
agccugguggaaguugggcag

SEQ ID NO: 3525 - RNA, 21 nt, Artificial Sequence
  Description of Artificial Sequence: Synthetic oligonucleotide
cccaacuuccaccaggcuucu

SEQ ID NO: 3526 - RNA, 21 nt, Artificial Sequence
  Description of Artificial Sequence: Synthetic oligonucleotide
aagccugguggaaguugggca

SEQ ID NO: 3527 - RNA, 21 nt, Artificial Sequence
  Description of Artificial Sequence: Synthetic oligonucleotide
ccaacuuccaccaggcuucuc

SEQ ID NO: 3528 - RNA, 21 nt, Artificial Sequence
  Description of Artificial Sequence: Synthetic oligonucleotide
gaagccugguggaaguugggc

SEQ ID NO: 3529 - RNA, 21 nt, Artificial Sequence
  Description of Artificial Sequence: Synthetic oligonucleotide
caacuuccaccaggcuucucu

SEQ ID NO: 3530 - RNA, 21 nt, Artificial Sequence
  Description of Artificial Sequence: Synthetic oligonucleotide
agaagccugguggaaguuggg

SEQ ID NO: 3531 - RNA, 21 nt, Artificial Sequence
  Description of Artificial Sequence: Synthetic oligonucleotide
aacuuccaccaggcuucucuc

SEQ ID NO: 3532 - RNA, 21 nt, Artificial Sequence
  Description of Artificial Sequence: Synthetic oligonucleotide
gagaagccugguggaaguugg

SEQ ID NO: 3533 - RNA, 21 nt, Artificial Sequence
  Description of Artificial Sequence: Synthetic oligonucleotide
acuuccaccaggcuucucucc

SEQ ID NO: 3534 - RNA, 21 nt, Artificial Sequence
  Description of Artificial Sequence: Synthetic oligonucleotide
agagaagccugguggaaguug

SEQ ID NO: 3535 - RNA, 21 nt, Artificial Sequence
  Description of Artificial Sequence: Synthetic oligonucleotide
cuuccaccaggcuucucucca

SEQ ID NO: 3536 - RNA, 21 nt, Artificial Sequence
  Description of Artificial Sequence: Synthetic oligonucleotide
gagagaagccugguggaaguu

SEQ ID NO: 3537 - RNA, 21 nt, Artificial Sequence
  Description of Artificial Sequence: Synthetic oligonucleotide
uuccaccaggcuucucuccag

SEQ ID NO: 3538 - RNA, 21 nt, Artificial Sequence
  Description of Artificial Sequence: Synthetic oligonucleotide
ggagagaagccugguggaagu

SEQ ID NO: 3539 - RNA, 21 nt, Artificial Sequence
  Description of Artificial Sequence: Synthetic oligonucleotide
uccaccaggcuucucuccaga

SEQ ID NO: 3540 - RNA, 21 nt, Artificial Sequence
  Description of Artificial Sequence: Synthetic oligonucleotide
uggagagaagccugguggaag

SEQ ID NO: 3541 - RNA, 21 nt, Artificial Sequence
  Description of Artificial Sequence: Synthetic oligonucleotide
ccaccaggcuucucuccagau

SEQ ID NO: 3542 - RNA, 21 nt, Artificial Sequence
  Description of Artificial Sequence: Synthetic oligonucleotide
cuggagagaagccugguggaa

SEQ ID NO: 3543 - RNA, 21 nt, Artificial Sequence
  Description of Artificial Sequence: Synthetic oligonucleotide
caccaggcuucucuccagaug

SEQ ID NO: 3544 - RNA, 21 nt, Artificial Sequence
  Description of Artificial Sequence: Synthetic oligonucleotide
ucuggagagaagccuggugga

SEQ ID NO: 3545 - RNA, 21 nt, Artificial Sequence
  Description of Artificial Sequence: Synthetic oligonucleotide
accaggcuucucuccagaugu

SEQ ID NO: 3546 - RNA, 21 nt, Artificial Sequence
  Description of Artificial Sequence: Synthetic oligonucleotide
aucuggagagaagccuggugg

SEQ ID NO: 3547 - RNA, 21 nt, Artificial Sequence
  Description of Artificial Sequence: Synthetic oligonucleotide
ccaggcuucucuccagauguc

SEQ ID NO: 3548 - RNA, 21 nt, Artificial Sequence
  Description of Artificial Sequence: Synthetic oligonucleotide
caucuggagagaagccuggug

SEQ ID NO: 3549 - RNA, 21 nt, Artificial Sequence
  Description of Artificial Sequence: Synthetic oligonucleotide
caggcuucucuccagaugucc

SEQ ID NO: 3550 - RNA, 21 nt, Artificial Sequence
  Description of Artificial Sequence: Synthetic oligonucleotide
acaucuggagagaagccuggu

SEQ ID NO: 3551 - RNA, 21 nt, Artificial Sequence
  Description of Artificial Sequence: Synthetic oligonucleotide
aggcuucucuccagaugucca

SEQ ID NO: 3552 - RNA, 21 nt, Artificial Sequence
  Description of Artificial Sequence: Synthetic oligonucleotide
gacaucuggagagaagccugg

SEQ ID NO: 3553 - RNA, 21 nt, Artificial Sequence
  Description of Artificial Sequence: Synthetic oligonucleotide
ggcuucucuccagauguccau

SEQ ID NO: 3554 - RNA, 21 nt, Artificial Sequence
  Description of Artificial Sequence: Synthetic oligonucleotide
ggacaucuggagagaagccug

SEQ ID NO: 3555 - RNA, 21 nt, Artificial Sequence
  Description of Artificial Sequence: Synthetic oligonucleotide
gcuucucuccagauguccauc

SEQ ID NO: 3556 - RNA, 21 nt, Artificial Sequence
  Description of Artificial Sequence: Synthetic oligonucleotide
uggacaucuggagagaagccu

SEQ ID NO: 3557 - RNA, 21 nt, Artificial Sequence
  Description of Artificial Sequence: Synthetic oligonucleotide
cuucucuccagauguccauca

SEQ ID NO: 3558 - RNA, 21 nt, Artificial Sequence
  Description of Artificial Sequence: Synthetic oligonucleotide
auggacaucuggagagaagcc

SEQ ID NO: 3559 - RNA, 21 nt, Artificial Sequence
  Description of Artificial Sequence: Synthetic oligonucleotide
uucucuccagauguccaucac

SEQ ID NO: 3560 - RNA, 21 nt, Artificial Sequence
  Description of Artificial Sequence: Synthetic oligonucleotide
gauggacaucuggagagaagc

SEQ ID NO: 3561 - RNA, 21 nt, Artificial Sequence
  Description of Artificial Sequence: Synthetic oligonucleotide
ucucuccagauguccaucacu

SEQ ID NO: 3562 - RNA, 21 nt, Artificial Sequence
  Description of Artificial Sequence: Synthetic oligonucleotide
ugauggacaucuggagagaag

SEQ ID NO: 3563 - RNA, 21 nt, Artificial Sequence
  Description of Artificial Sequence: Synthetic oligonucleotide
cucuccagauguccaucacuu

SEQ ID NO: 3564 - RNA, 21 nt, Artificial Sequence
  Description of Artificial Sequence: Synthetic oligonucleotide
gugauggacaucuggagagaa

SEQ ID NO: 3565 - RNA, 21 nt, Artificial Sequence
  Description of Artificial Sequence: Synthetic oligonucleotide
ucuccagauguccaucacuug

SEQ ID NO: 3566 - RNA, 21 nt, Artificial Sequence
  Description of Artificial Sequence: Synthetic oligonucleotide
agugauggacaucuggagaga

SEQ ID NO: 3567 - RNA, 21 nt, Artificial Sequence
  Description of Artificial Sequence: Synthetic oligonucleotide
cuccagauguccaucacuugg

SEQ ID NO: 3568 - RNA, 21 nt, Artificial Sequence
  Description of Artificial Sequence: Synthetic oligonucleotide
aagugauggacaucuggagag

SEQ ID NO: 3569 - RNA, 21 nt, Artificial Sequence
  Description of Artificial Sequence: Synthetic oligonucleotide
uccagauguccaucacuuggc

SEQ ID NO: 3570 - RNA, 21 nt, Artificial Sequence
  Description of Artificial Sequence: Synthetic oligonucleotide
caagugauggacaucuggaga

SEQ ID NO: 3571 - RNA, 21 nt, Artificial Sequence
  Description of Artificial Sequence: Synthetic oligonucleotide
ccagauguccaucacuuggca

SEQ ID NO: 3572 - RNA, 21 nt, Artificial Sequence
  Description of Artificial Sequence: Synthetic oligonucleotide
ccaagugauggacaucuggag

SEQ ID NO: 3573 - RNA, 21 nt, Artificial Sequence
  Description of Artificial Sequence: Synthetic oligonucleotide
cagauguccaucacuuggcag

SEQ ID NO: 3574 - RNA, 21 nt, Artificial Sequence
  Description of Artificial Sequence: Synthetic oligonucleotide
gccaagugauggacaucugga

SEQ ID NO: 3575 - RNA, 21 nt, Artificial Sequence
  Description of Artificial Sequence: Synthetic oligonucleotide
agauguccaucacuuggcagc

SEQ ID NO: 3576 - RNA, 21 nt, Artificial Sequence
  Description of Artificial Sequence: Synthetic oligonucleotide
ugccaagugauggacaucugg

SEQ ID NO: 3577 - RNA, 21 nt, Artificial Sequence
  Description of Artificial Sequence: Synthetic oligonucleotide
gauguccaucacuuggcagcu

SEQ ID NO: 3578 - RNA, 21 nt, Artificial Sequence
  Description of Artificial Sequence: Synthetic oligonucleotide
cugccaagugauggacaucug

SEQ ID NO: 3579 - RNA, 21 nt, Artificial Sequence
  Description of Artificial Sequence: Synthetic oligonucleotide
auguccaucacuuggcagcug

SEQ ID NO: 3580 - RNA, 21 nt, Artificial Sequence
  Description of Artificial Sequence: Synthetic oligonucleotide
gcugccaagugauggacaucu

SEQ ID NO: 3581 - RNA, 21 nt, Artificial Sequence
  Description of Artificial Sequence: Synthetic oligonucleotide
uguccaucacuuggcagcugg

SEQ ID NO: 3582 - RNA, 21 nt, Artificial Sequence
  Description of Artificial Sequence: Synthetic oligonucleotide
agcugccaagugauggacauc

SEQ ID NO: 3583 - RNA, 21 nt, Artificial Sequence
  Description of Artificial Sequence: Synthetic oligonucleotide
guccaucacuuggcagcuggg

SEQ ID NO: 3584 - RNA, 21 nt, Artificial Sequence
  Description of Artificial Sequence: Synthetic oligonucleotide
cagcugccaagugauggacau

SEQ ID NO: 3585 - RNA, 21 nt, Artificial Sequence
  Description of Artificial Sequence: Synthetic oligonucleotide
uccaucacuuggcagcugggc

SEQ ID NO: 3586 - RNA, 21 nt, Artificial Sequence
  Description of Artificial Sequence: Synthetic oligonucleotide
ccagcugccaagugauggaca

SEQ ID NO: 3587 - RNA, 21 nt, Artificial Sequence
  Description of Artificial Sequence: Synthetic oligonucleotide
ccaucacuuggcagcugggca

SEQ ID NO: 3588 - RNA, 21 nt, Artificial Sequence
  Description of Artificial Sequence: Synthetic oligonucleotide
cccagcugccaagugauggac

SEQ ID NO: 3589 - RNA, 21 nt, Artificial Sequence
  Description of Artificial Sequence: Synthetic oligonucleotide
caucacuuggcagcugggcag

SEQ ID NO: 3590 - RNA, 21 nt, Artificial Sequence
  Description of Artificial Sequence: Synthetic oligonucleotide
gcccagcugccaagugaugga

SEQ ID NO: 3591 - RNA, 21 nt, Artificial Sequence
  Description of Artificial Sequence: Synthetic oligonucleotide
aucacuuggcagcugggcaga

SEQ ID NO: 3592 - RNA, 21 nt, Artificial Sequence
  Description of Artificial Sequence: Synthetic oligonucleotide
ugcccagcugccaagugaugg

SEQ ID NO: 3593 - RNA, 21 nt, Artificial Sequence
  Description of Artificial Sequence: Synthetic oligonucleotide
ucacuuggcagcugggcagac

SEQ ID NO: 3594 - RNA, 21 nt, Artificial Sequence
  Description of Artificial Sequence: Synthetic oligonucleotide
cugcccagcugccaagugaug

SEQ ID NO: 3595 - RNA, 21 nt, Artificial Sequence
  Description of Artificial Sequence: Synthetic oligonucleotide
cacuuggcagcugggcagacg

SEQ ID NO: 3596 - RNA, 21 nt, Artificial Sequence
  Description of Artificial Sequence: Synthetic oligonucleotide
ucugcccagcugccaagugau

SEQ ID NO: 3597 - RNA, 21 nt, Artificial Sequence
  Description of Artificial Sequence: Synthetic oligonucleotide
acuuggcagcugggcagacgc

SEQ ID NO: 3598 - RNA, 21 nt, Artificial Sequence
  Description of Artificial Sequence: Synthetic oligonucleotide
gucugcccagcugccaaguga

SEQ ID NO: 3599 - RNA, 21 nt, Artificial Sequence
  Description of Artificial Sequence: Synthetic oligonucleotide
cuuggcagcugggcagacgcc

SEQ ID NO: 3600 - RNA, 21 nt, Artificial Sequence
  Description of Artificial Sequence: Synthetic oligonucleotide
cgucugcccagcugccaagug

SEQ ID NO: 3601 - RNA, 21 nt, Artificial Sequence
  Description of Artificial Sequence: Synthetic oligonucleotide
uuggcagcugggcagacgcca

SEQ ID NO: 3602 - RNA, 21 nt, Artificial Sequence
  Description of Artificial Sequence: Synthetic oligonucleotide
gcgucugcccagcugccaagu

SEQ ID NO: 3603 - RNA, 21 nt, Artificial Sequence
  Description of Artificial Sequence: Synthetic oligonucleotide
uggcagcugggcagacgccag

SEQ ID NO: 3604 - RNA, 21 nt, Artificial Sequence
  Description of Artificial Sequence: Synthetic oligonucleotide
ggcgucugcccagcugccaag

SEQ ID NO: 3605 - RNA, 21 nt, Artificial Sequence
  Description of Artificial Sequence: Synthetic oligonucleotide
ggcagcugggcagacgccagc

SEQ ID NO: 3606 - RNA, 21 nt, Artificial Sequence
  Description of Artificial Sequence: Synthetic oligonucleotide
uggcgucugcccagcugccaa

SEQ ID NO: 3607 - RNA, 21 nt, Artificial Sequence
  Description of Artificial Sequence: Synthetic oligonucleotide
gcagcugggcagacgccagcc

SEQ ID NO: 3608 - RNA, 21 nt, Artificial Sequence
  Description of Artificial Sequence: Synthetic oligonucleotide
cuggcgucugcccagcugcca

SEQ ID NO: 3609 - RNA, 21 nt, Artificial Sequence
  Description of Artificial Sequence: Synthetic oligonucleotide
cagcugggcagacgccagccc

SEQ ID NO: 3610 - RNA, 21 nt, Artificial Sequence
  Description of Artificial Sequence: Synthetic oligonucleotide
gcuggcgucugcccagcugcc

SEQ ID NO: 3611 - RNA, 21 nt, Artificial Sequence
  Description of Artificial Sequence: Synthetic oligonucleotide
agcugggcagacgccagcccg

SEQ ID NO: 3612 - RNA, 21 nt, Artificial Sequence
  Description of Artificial Sequence: Synthetic oligonucleotide
ggcuggcgucugcccagcugc

SEQ ID NO: 3613 - RNA, 21 nt, Artificial Sequence
  Description of Artificial Sequence: Synthetic oligonucleotide
gcugggcagacgccagcccgu

SEQ ID NO: 3614 - RNA, 21 nt, Artificial Sequence
  Description of Artificial Sequence: Synthetic oligonucleotide
gggcuggcgucugcccagcug

SEQ ID NO: 3615 - RNA, 21 nt, Artificial Sequence
  Description of Artificial Sequence: Synthetic oligonucleotide
cugggcagacgccagcccguu

SEQ ID NO: 3616 - RNA, 21 nt, Artificial Sequence
  Description of Artificial Sequence: Synthetic oligonucleotide
cgggcuggcgucugcccagcu

SEQ ID NO: 3617 - RNA, 21 nt, Artificial Sequence
  Description of Artificial Sequence: Synthetic oligonucleotide
ugggcagacgccagcccguua

SEQ ID NO: 3618 - RNA, 21 nt, Artificial Sequence
  Description of Artificial Sequence: Synthetic oligonucleotide
acgggcuggcgucugcccagc

SEQ ID NO: 3619 - RNA, 21 nt, Artificial Sequence
  Description of Artificial Sequence: Synthetic oligonucleotide
gggcagacgccagcccguuau

SEQ ID NO: 3620 - RNA, 21 nt, Artificial Sequence
  Description of Artificial Sequence: Synthetic oligonucleotide
aacgggcuggcgucugcccag

SEQ ID NO: 3621 - RNA, 21 nt, Artificial Sequence
  Description of Artificial Sequence: Synthetic oligonucleotide
ggcagacgccagcccguuaug

SEQ ID NO: 3622 - RNA, 21 nt, Artificial Sequence
  Description of Artificial Sequence: Synthetic oligonucleotide
uaacgggcuggcgucugccca

SEQ ID NO: 3623 - RNA, 21 nt, Artificial Sequence
  Description of Artificial Sequence: Synthetic oligonucleotide
gcagacgccagcccguuaugg

SEQ ID NO: 3624 - RNA, 21 nt, Artificial Sequence
  Description of Artificial Sequence: Synthetic oligonucleotide
auaacgggcuggcgucugccc

SEQ ID NO: 3625 - RNA, 21 nt, Artificial Sequence
  Description of Artificial Sequence: Synthetic oligonucleotide
cagacgccagcccguuauggu

SEQ ID NO: 3626 - RNA, 21 nt, Artificial Sequence
  Description of Artificial Sequence: Synthetic oligonucleotide
cauaacgggcuggcgucugcc

SEQ ID NO: 3627 - RNA, 21 nt, Artificial Sequence
  Description of Artificial Sequence: Synthetic oligonucleotide
agacgccagcccguuauggug

SEQ ID NO: 3628 - RNA, 21 nt, Artificial Sequence
  Description of Artificial Sequence: Synthetic oligonucleotide
ccauaacgggcuggcgucugc

SEQ ID NO: 3629 - RNA, 21 nt, Artificial Sequence
  Description of Artificial Sequence: Synthetic oligonucleotide
gacgccagcccguuauggugg

SEQ ID NO: 3630 - RNA, 21 nt, Artificial Sequence
  Description of Artificial Sequence: Synthetic oligonucleotide
accauaacgggcuggcgucug

SEQ ID NO: 3631 - RNA, 21 nt, Artificial Sequence
  Description of Artificial Sequence: Synthetic oligonucleotide
acgccagcccguuaugguggc

SEQ ID NO: 3632 - RNA, 21 nt, Artificial Sequence
  Description of Artificial Sequence: Synthetic oligonucleotide
caccauaacgggcuggcgucu

SEQ ID NO: 3633 - RNA, 21 nt, Artificial Sequence
  Description of Artificial Sequence: Synthetic oligonucleotide
cgccagcccguuaugguggcu

SEQ ID NO: 3634 - RNA, 21 nt, Artificial Sequence
  Description of Artificial Sequence: Synthetic oligonucleotide
ccaccauaacgggcuggcguc

SEQ ID NO: 3635 - RNA, 21 nt, Artificial Sequence
  Description of Artificial Sequence: Synthetic oligonucleotide
gccagcccguuaugguggcug

SEQ ID NO: 3636 - RNA, 21 nt, Artificial Sequence
  Description of Artificial Sequence: Synthetic oligonucleotide
gccaccauaacgggcuggcgu

SEQ ID NO: 3637 - RNA, 21 nt, Artificial Sequence
  Description of Artificial Sequence: Synthetic oligonucleotide
ccagcccguuaugguggcugu

SEQ ID NO: 3638 - RNA, 21 nt, Artificial Sequence
  Description of Artificial Sequence: Synthetic oligonucleotide
agccaccauaacgggcuggcg

SEQ ID NO: 3639 - RNA, 21 nt, Artificial Sequence
  Description of Artificial Sequence: Synthetic oligonucleotide
cagcccguuaugguggcugug

SEQ ID NO: 3640 - RNA, 21 nt, Artificial Sequence
  Description of Artificial Sequence: Synthetic oligonucleotide
cagccaccauaacgggcuggc

SEQ ID NO: 3641 - RNA, 21 nt, Artificial Sequence
  Description of Artificial Sequence: Synthetic oligonucleotide
agcccguuaugguggcugugg

SEQ ID NO: 3642 - RNA, 21 nt, Artificial Sequence
  Description of Artificial Sequence: Synthetic oligonucleotide
acagccaccauaacgggcugg

SEQ ID NO: 3643 - RNA, 21 nt, Artificial Sequence
  Description of Artificial Sequence: Synthetic oligonucleotide
gcccguuaugguggcuguggg

SEQ ID NO: 3644 - RNA, 21 nt, Artificial Sequence
  Description of Artificial Sequence: Synthetic oligonucleotide
cacagccaccauaacgggcug

SEQ ID NO: 3645 - RNA, 21 nt, Artificial Sequence
  Description of Artificial Sequence: Synthetic oligonucleotide
cccguuaugguggcugugggc

SEQ ID NO: 3646 - RNA, 21 nt, Artificial Sequence
  Description of Artificial Sequence: Synthetic oligonucleotide
ccacagccaccauaacgggcu

SEQ ID NO: 3647 - RNA, 21 nt, Artificial Sequence
  Description of Artificial Sequence: Synthetic oligonucleotide
ccguuaugguggcugugggcc

SEQ ID NO: 3648 - RNA, 21 nt, Artificial Sequence
  Description of Artificial Sequence: Synthetic oligonucleotide
cccacagccaccauaacgggc

SEQ ID NO: 3649 - RNA, 21 nt, Artificial Sequence
  Description of Artificial Sequence: Synthetic oligonucleotide
cguuaugguggcugugggcca

SEQ ID NO: 3650 - RNA, 21 nt, Artificial Sequence
  Description of Artificial Sequence: Synthetic oligonucleotide
gcccacagccaccauaacggg

SEQ ID NO: 3651 - RNA, 21 nt, Artificial Sequence
  Description of Artificial Sequence: Synthetic oligonucleotide
guuaugguggcugugggccag

SEQ ID NO: 3652 - RNA, 21 nt, Artificial Sequence
  Description of Artificial Sequence: Synthetic oligonucleotide
ggcccacagccaccauaacgg

SEQ ID NO: 3653 - RNA, 21 nt, Artificial Sequence
  Description of Artificial Sequence: Synthetic oligonucleotide
uuaugguggcugugggccagc

SEQ ID NO: 3654 - RNA, 21 nt, Artificial Sequence
  Description of Artificial Sequence: Synthetic oligonucleotide
uggcccacagccaccauaacg

SEQ ID NO: 3655 - RNA, 21 nt, Artificial Sequence
  Description of Artificial Sequence: Synthetic oligonucleotide
uaugguggcugugggccagca

SEQ ID NO: 3656 - RNA, 21 nt, Artificial Sequence
  Description of Artificial Sequence: Synthetic oligonucleotide
cuggcccacagccaccauaac

SEQ ID NO: 3657 - RNA, 21 nt, Artificial Sequence
  Description of Artificial Sequence: Synthetic oligonucleotide
augguggcugugggccagcau

SEQ ID NO: 3658 - RNA, 21 nt, Artificial Sequence
  Description of Artificial Sequence: Synthetic oligonucleotide
gcuggcccacagccaccauaa

SEQ ID NO: 3659 - RNA, 21 nt, Artificial Sequence
  Description of Artificial Sequence: Synthetic oligonucleotide
ugguggcugugggccagcaug

SEQ ID NO: 3660 - RNA, 21 nt, Artificial Sequence
  Description of Artificial Sequence: Synthetic oligonucleotide
ugcuggcccacagccaccaua

SEQ ID NO: 3661 - RNA, 21 nt, Artificial Sequence
  Description of Artificial Sequence: Synthetic oligonucleotide
gguggcugugggccagcauga

SEQ ID NO: 3662 - RNA, 21 nt, Artificial Sequence
  Description of Artificial Sequence: Synthetic oligonucleotide
augcuggcccacagccaccau

SEQ ID NO: 3663 - RNA, 21 nt, Artificial Sequence
  Description of Artificial Sequence: Synthetic oligonucleotide
guggcugugggccagcaugag

SEQ ID NO: 3664 - RNA, 21 nt, Artificial Sequence
  Description of Artificial Sequence: Synthetic oligonucleotide
caugcuggcccacagccacca

SEQ ID NO: 3665 - RNA, 21 nt, Artificial Sequence
  Description of Artificial Sequence: Synthetic oligonucleotide
uggcugugggccagcaugagg

SEQ ID NO: 3666 - RNA, 21 nt, Artificial Sequence
  Description of Artificial Sequence: Synthetic oligonucleotide
ucaugcuggcccacagccacc

SEQ ID NO: 3667 - RNA, 21 nt, Artificial Sequence
  Description of Artificial Sequence: Synthetic oligonucleotide
ggcugugggccagcaugagga

SEQ ID NO: 3668 - RNA, 21 nt, Artificial Sequence
  Description of Artificial Sequence: Synthetic oligonucleotide
cucaugcuggcccacagccac

SEQ ID NO: 3669 - RNA, 21 nt, Artificial Sequence
  Description of Artificial Sequence: Synthetic oligonucleotide
gcugugggccagcaugaggag

SEQ ID NO: 3670 - RNA, 21 nt, Artificial Sequence
  Description of Artificial Sequence: Synthetic oligonucleotide
ccucaugcuggcccacagcca

SEQ ID NO: 3671 - RNA, 21 nt, Artificial Sequence
  Description of Artificial Sequence: Synthetic oligonucleotide
cugugggccagcaugaggagg

SEQ ID NO: 3672 - RNA, 21 nt, Artificial Sequence
  Description of Artificial Sequence: Synthetic oligonucleotide
uccucaugcuggcccacagcc

SEQ ID NO: 3673 - RNA, 21 nt, Artificial Sequence
  Description of Artificial Sequence: Synthetic oligonucleotide
ugugggccagcaugaggagga

SEQ ID NO: 3674 - RNA, 21 nt, Artificial Sequence
  Description of Artificial Sequence: Synthetic oligonucleotide
cuccucaugcuggcccacagc

SEQ ID NO: 3675 - RNA, 21 nt, Artificial Sequence
  Description of Artificial Sequence: Synthetic oligonucleotide
gugggccagcaugaggaggag

SEQ ID NO: 3676 - RNA, 21 nt, Artificial Sequence
  Description of Artificial Sequence: Synthetic oligonucleotide
ccuccucaugcuggcccacag

SEQ ID NO: 3677 - RNA, 21 nt, Artificial Sequence
  Description of Artificial Sequence: Synthetic oligonucleotide
ugggccagcaugaggaggagu

SEQ ID NO: 3678 - RNA, 21 nt, Artificial Sequence
  Description of Artificial Sequence: Synthetic oligonucleotide
uccuccucaugcuggcccaca

SEQ ID NO: 3679 - RNA, 21 nt, Artificial Sequence
  Description of Artificial Sequence: Synthetic oligonucleotide
gggccagcaugaggaggagua

SEQ ID NO: 3680 - RNA, 21 nt, Artificial Sequence
  Description of Artificial Sequence: Synthetic oligonucleotide
cuccuccucaugcuggcccac

SEQ ID NO: 3681 - RNA, 21 nt, Artificial Sequence
  Description of Artificial Sequence: Synthetic oligonucleotide
ggccagcaugaggaggaguau

SEQ ID NO: 3682 - RNA, 21 nt, Artificial Sequence
  Description of Artificial Sequence: Synthetic oligonucleotide
acuccuccucaugcuggccca

SEQ ID NO: 3683 - RNA, 21 nt, Artificial Sequence
  Description of Artificial Sequence: Synthetic oligonucleotide
gccagcaugaggaggaguauu

SEQ ID NO: 3684 - RNA, 21 nt, Artificial Sequence
  Description of Artificial Sequence: Synthetic oligonucleotide
uacuccuccucaugcuggccc

SEQ ID NO: 3685 - RNA, 21 nt, Artificial Sequence
  Description of Artificial Sequence: Synthetic oligonucleotide
ccagcaugaggaggaguauuu

SEQ ID NO: 3686 - RNA, 21 nt, Artificial Sequence
  Description of Artificial Sequence: Synthetic oligonucleotide
auacuccuccucaugcuggcc

SEQ ID NO: 3687 - RNA, 21 nt, Artificial Sequence
  Description of Artificial Sequence: Synthetic oligonucleotide
cagcaugaggaggaguauuuu

SEQ ID NO: 3688 - RNA, 21 nt, Artificial Sequence
  Description of Artificial Sequence: Synthetic oligonucleotide
aauacuccuccucaugcuggc

SEQ ID NO: 3689 - RNA, 21 nt, Artificial Sequence
  Description of Artificial Sequence: Synthetic oligonucleotide
agcaugaggaggaguauuuuu

SEQ ID NO: 3690 - RNA, 21 nt, Artificial Sequence
  Description of Artificial Sequence: Synthetic oligonucleotide
aaauacuccuccucaugcugg

SEQ ID NO: 3691 - RNA, 21 nt, Artificial Sequence
  Description of Artificial Sequence: Synthetic oligonucleotide
gcaugaggaggaguauuuuuc

SEQ ID NO: 3692 - RNA, 21 nt, Artificial Sequence
  Description of Artificial Sequence: Synthetic oligonucleotide
aaaauacuccuccucaugcug

SEQ ID NO: 3693 - RNA, 21 nt, Artificial Sequence
  Description of Artificial Sequence: Synthetic oligonucleotide
caugaggaggaguauuuuucg

SEQ ID NO: 3694 - RNA, 21 nt, Artificial Sequence
  Description of Artificial Sequence: Synthetic oligonucleotide
aaaaauacuccuccucaugcu

SEQ ID NO: 3695 - RNA, 21 nt, Artificial Sequence
  Description of Artificial Sequence: Synthetic oligonucleotide
augaggaggaguauuuuucgg

SEQ ID NO: 3696 - RNA, 21 nt, Artificial Sequence
  Description of Artificial Sequence: Synthetic oligonucleotide
gaaaaauacuccuccucaugc

SEQ ID NO: 3697 - RNA, 21 nt, Artificial Sequence
  Description of Artificial Sequence: Synthetic oligonucleotide
ugaggaggaguauuuuucggg

SEQ ID NO: 3698 - RNA, 21 nt, Artificial Sequence
  Description of Artificial Sequence: Synthetic oligonucleotide
cgaaaaauacuccuccucaug

SEQ ID NO: 3699 - RNA, 21 nt, Artificial Sequence
  Description of Artificial Sequence: Synthetic oligonucleotide
gaggaggaguauuuuucgggc

SEQ ID NO: 3700 - RNA, 21 nt, Artificial Sequence
  Description of Artificial Sequence: Synthetic oligonucleotide
ccgaaaaauacuccuccucau

SEQ ID NO: 3701 - RNA, 21 nt, Artificial Sequence
  Description of Artificial Sequence: Synthetic oligonucleotide
aggaggaguauuuuucgggcc

SEQ ID NO: 3702 - RNA, 21 nt, Artificial Sequence
  Description of Artificial Sequence: Synthetic oligonucleotide
cccgaaaaauacuccuccuca

SEQ ID NO: 3703 - RNA, 21 nt, Artificial Sequence
  Description of Artificial Sequence: Synthetic oligonucleotide
ggaggaguauuuuucgggccc

SEQ ID NO: 3704 - RNA, 21 nt, Artificial Sequence
  Description of Artificial Sequence: Synthetic oligonucleotide
gcccgaaaaauacuccuccuc

SEQ ID NO: 3705 - RNA, 21 nt, Artificial Sequence
  Description of Artificial Sequence: Synthetic oligonucleotide
gaggaguauuuuucgggcccu

SEQ ID NO: 3706 - RNA, 21 nt, Artificial Sequence
  Description of Artificial Sequence: Synthetic oligonucleotide
ggcccgaaaaauacuccuccu

SEQ ID NO: 3707 - RNA, 21 nt, Artificial Sequence
  Description of Artificial Sequence: Synthetic oligonucleotide
aggaguauuuuucgggcccug

SEQ ID NO: 3708 - RNA, 21 nt, Artificial Sequence
  Description of Artificial Sequence: Synthetic oligonucleotide
gggcccgaaaaauacuccucc

SEQ ID NO: 3709 - RNA, 21 nt, Artificial Sequence
  Description of Artificial Sequence: Synthetic oligonucleotide
ggaguauuuuucgggcccuga

SEQ ID NO: 3710 - RNA, 21 nt, Artificial Sequence
  Description of Artificial Sequence: Synthetic oligonucleotide
agggcccgaaaaauacuccuc

SEQ ID NO: 3711 - RNA, 21 nt, Artificial Sequence
  Description of Artificial Sequence: Synthetic oligonucleotide
gaguauuuuucgggcccugag

SEQ ID NO: 3712 - RNA, 21 nt, Artificial Sequence
  Description of Artificial Sequence: Synthetic oligonucleotide
cagggcccgaaaaauacuccu

SEQ ID NO: 3713 - RNA, 21 nt, Artificial Sequence
  Description of Artificial Sequence: Synthetic oligonucleotide
aguauuuuucgggcccugagc

SEQ ID NO: 3714 - RNA, 21 nt, Artificial Sequence
  Description of Artificial Sequence: Synthetic oligonucleotide
ucagggcccgaaaaauacucc

SEQ ID NO: 3715 - RNA, 21 nt, Artificial Sequence
  Description of Artificial Sequence: Synthetic oligonucleotide
guauuuuucgggcccugagcc

SEQ ID NO: 3716 - RNA, 21 nt, Artificial Sequence
  Description of Artificial Sequence: Synthetic oligonucleotide
cucagggcccgaaaaauacuc

SEQ ID NO: 3717 - RNA, 21 nt, Artificial Sequence
  Description of Artificial Sequence: Synthetic oligonucleotide
uauuuuucgggcccugagccu

SEQ ID NO: 3718 - RNA, 21 nt, Artificial Sequence
  Description of Artificial Sequence: Synthetic oligonucleotide
gcucagggcccgaaaaauacu

SEQ ID NO: 3719 - RNA, 21 nt, Artificial Sequence
  Description of Artificial Sequence: Synthetic oligonucleotide
auuuuucgggcccugagccua

SEQ ID NO: 3720 - RNA, 21 nt, Artificial Sequence
  Description of Artificial Sequence: Synthetic oligonucleotide
ggcucagggcccgaaaaauac

SEQ ID NO: 3721 - RNA, 21 nt, Artificial Sequence
  Description of Artificial Sequence: Synthetic oligonucleotide
uuuuucgggcccugagccuaa

SEQ ID NO: 3722 - RNA, 21 nt, Artificial Sequence
  Description of Artificial Sequence: Synthetic oligonucleotide
aggcucagggcccgaaaaaua

SEQ ID NO: 3723 - RNA, 21 nt, Artificial Sequence
  Description of Artificial Sequence: Synthetic oligonucleotide
uuuucgggcccugagccuaag

SEQ ID NO: 3724 - RNA, 21 nt, Artificial Sequence
  Description of Artificial Sequence: Synthetic oligonucleotide
uaggcucagggcccgaaaaau

SEQ ID NO: 3725 - RNA, 21 nt, Artificial Sequence
  Description of Artificial Sequence: Synthetic oligonucleotide
uuucgggcccugagccuaagg

SEQ ID NO: 3726 - RNA, 21 nt, Artificial Sequence
  Description of Artificial Sequence: Synthetic oligonucleotide
uuaggcucagggcccgaaaaa

SEQ ID NO: 3727 - RNA, 21 nt, Artificial Sequence
  Description of Artificial Sequence: Synthetic oligonucleotide
uucgggcccugagccuaaggc

SEQ ID NO: 3728 - RNA, 21 nt, Artificial Sequence
  Description of Artificial Sequence: Synthetic oligonucleotide
cuuaggcucagggcccgaaaa

SEQ ID NO: 3729 - RNA, 21 nt, Artificial Sequence
  Description of Artificial Sequence: Synthetic oligonucleotide
ucgggcccugagccuaaggcu

SEQ ID NO: 3730 - RNA, 21 nt, Artificial Sequence
  Description of Artificial Sequence: Synthetic oligonucleotide
ccuuaggcucagggcccgaaa

SEQ ID NO: 3731 - RNA, 21 nt, Artificial Sequence
  Description of Artificial Sequence: Synthetic oligonucleotide
cgggcccugagccuaaggcug

SEQ ID NO: 3732 - RNA, 21 nt, Artificial Sequence
  Description of Artificial Sequence: Synthetic oligonucleotide
gccuuaggcucagggcccgaa

SEQ ID NO: 3733 - RNA, 21 nt, Artificial Sequence
  Description of Artificial Sequence: Synthetic oligonucleotide
gggcccugagccuaaggcugu

SEQ ID NO: 3734 - RNA, 21 nt, Artificial Sequence
  Description of Artificial Sequence: Synthetic oligonucleotide
agccuuaggcucagggcccga

SEQ ID NO: 3735 - RNA, 21 nt, Artificial Sequence
  Description of Artificial Sequence: Synthetic oligonucleotide
ggcccugagccuaaggcugug

SEQ ID NO: 3736 - RNA, 21 nt, Artificial Sequence
  Description of Artificial Sequence: Synthetic oligonucleotide
cagccuuaggcucagggcccg

SEQ ID NO: 3737 - RNA, 21 nt, Artificial Sequence
  Description of Artificial Sequence: Synthetic oligonucleotide
gcccugagccuaaggcugugc

SEQ ID NO: 3738 - RNA, 21 nt, Artificial Sequence
  Description of Artificial Sequence: Synthetic oligonucleotide
acagccuuaggcucagggccc

SEQ ID NO: 3739 - RNA, 21 nt, Artificial Sequence
  Description of Artificial Sequence: Synthetic oligonucleotide
cccugagccuaaggcugugcu

SEQ ID NO: 3740 - RNA, 21 nt, Artificial Sequence
  Description of Artificial Sequence: Synthetic oligonucleotide
cacagccuuaggcucagggcc

SEQ ID NO: 3741 - RNA, 21 nt, Artificial Sequence
  Description of Artificial Sequence: Synthetic oligonucleotide
ccugagccuaaggcugugcug

SEQ ID NO: 3742 - RNA, 21 nt, Artificial Sequence
  Description of Artificial Sequence: Synthetic oligonucleotide
gcacagccuuaggcucagggc

SEQ ID NO: 3743 - RNA, 21 nt, Artificial Sequence
  Description of Artificial Sequence: Synthetic oligonucleotide
cugagccuaaggcugugcuga

SEQ ID NO: 3744 - RNA, 21 nt, Artificial Sequence
  Description of Artificial Sequence: Synthetic oligonucleotide
agcacagccuuaggcucaggg

SEQ ID NO: 3745 - RNA, 21 nt, Artificial Sequence
  Description of Artificial Sequence: Synthetic oligonucleotide
ugagccuaaggcugugcugaa

SEQ ID NO: 3746 - RNA, 21 nt, Artificial Sequence
  Description of Artificial Sequence: Synthetic oligonucleotide
cagcacagccuuaggcucagg

SEQ ID NO: 3747 - RNA, 21 nt, Artificial Sequence
  Description of Artificial Sequence: Synthetic oligonucleotide
gagccuaaggcugugcugaag

SEQ ID NO: 3748 - RNA, 21 nt, Artificial Sequence
  Description of Artificial Sequence: Synthetic oligonucleotide
ucagcacagccuuaggcucag

SEQ ID NO: 3749 - RNA, 21 nt, Artificial Sequence
  Description of Artificial Sequence: Synthetic oligonucleotide
agccuaaggcugugcugaaga

SEQ ID NO: 3750 - RNA, 21 nt, Artificial Sequence
  Description of Artificial Sequence: Synthetic oligonucleotide
uucagcacagccuuaggcuca

SEQ ID NO: 3751 - RNA, 21 nt, Artificial Sequence
  Description of Artificial Sequence: Synthetic oligonucleotide
gccuaaggcugugcugaagaa

SEQ ID NO: 3752 - RNA, 21 nt, Artificial Sequence
  Description of Artificial Sequence: Synthetic oligonucleotide
cuucagcacagccuuaggcuc

SEQ ID NO: 3753 - RNA, 21 nt, Artificial Sequence
  Description of Artificial Sequence: Synthetic oligonucleotide
ccuaaggcugugcugaagaag

SEQ ID NO: 3754 - RNA, 21 nt, Artificial Sequence
  Description of Artificial Sequence: Synthetic oligonucleotide
ucuucagcacagccuuaggcu

SEQ ID NO: 3755 - RNA, 21 nt, Artificial Sequence
  Description of Artificial Sequence: Synthetic oligonucleotide
cuaaggcugugcugaagaagu

SEQ ID NO: 3756 - RNA, 21 nt, Artificial Sequence
  Description of Artificial Sequence: Synthetic oligonucleotide
uucuucagcacagccuuaggc

SEQ ID NO: 3757 - RNA, 21 nt, Artificial Sequence
  Description of Artificial Sequence: Synthetic oligonucleotide
uaaggcugugcugaagaaguu

SEQ ID NO: 3758 - RNA, 21 nt, Artificial Sequence
  Description of Artificial Sequence: Synthetic oligonucleotide
cuucuucagcacagccuuagg

SEQ ID NO: 3759 - RNA, 21 nt, Artificial Sequence
  Description of Artificial Sequence: Synthetic oligonucleotide
aaggcugugcugaagaaguuc

SEQ ID NO: 3760 - RNA, 21 nt, Artificial Sequence
  Description of Artificial Sequence: Synthetic oligonucleotide
acuucuucagcacagccuuag

SEQ ID NO: 3761 - RNA, 21 nt, Artificial Sequence
  Description of Artificial Sequence: Synthetic oligonucleotide
aggcugugcugaagaaguuca

SEQ ID NO: 3762 - RNA, 21 nt, Artificial Sequence
  Description of Artificial Sequence: Synthetic oligonucleotide
aacuucuucagcacagccuua

SEQ ID NO: 3763 - RNA, 21 nt, Artificial Sequence
  Description of Artificial Sequence: Synthetic oligonucleotide
ggcugugcugaagaaguucag

SEQ ID NO: 3764 - RNA, 21 nt, Artificial Sequence
  Description of Artificial Sequence: Synthetic oligonucleotide
gaacuucuucagcacagccuu

SEQ ID NO: 3765 - RNA, 21 nt, Artificial Sequence
  Description of Artificial Sequence: Synthetic oligonucleotide
gcugugcugaagaaguucagg

SEQ ID NO: 3766 - RNA, 21 nt, Artificial Sequence
  Description of Artificial Sequence: Synthetic oligonucleotide
ugaacuucuucagcacagccu

SEQ ID NO: 3767 - RNA, 21 nt, Artificial Sequence
  Description of Artificial Sequence: Synthetic oligonucleotide
cugugcugaagaaguucaggg

SEQ ID NO: 3768 - RNA, 21 nt, Artificial Sequence
  Description of Artificial Sequence: Synthetic oligonucleotide
cugaacuucuucagcacagcc

SEQ ID NO: 3769 - RNA, 21 nt, Artificial Sequence
  Description of Artificial Sequence: Synthetic oligonucleotide
ugugcugaagaaguucaggga

SEQ ID NO: 3770 - RNA, 21 nt, Artificial Sequence
  Description of Artificial Sequence: Synthetic oligonucleotide
ccugaacuucuucagcacagc

SEQ ID NO: 3771 - RNA, 21 nt, Artificial Sequence
  Description of Artificial Sequence: Synthetic oligonucleotide
gugcugaagaaguucagggag

SEQ ID NO: 3772 - RNA, 21 nt, Artificial Sequence
  Description of Artificial Sequence: Synthetic oligonucleotide
cccugaacuucuucagcacag

SEQ ID NO: 3773 - RNA, 21 nt, Artificial Sequence
  Description of Artificial Sequence: Synthetic oligonucleotide
ugcugaagaaguucagggagg

SEQ ID NO: 3774 - RNA, 21 nt, Artificial Sequence
  Description of Artificial Sequence: Synthetic oligonucleotide
ucccugaacuucuucagcaca

SEQ ID NO: 3775 - RNA, 21 nt, Artificial Sequence
  Description of Artificial Sequence: Synthetic oligonucleotide
gcugaagaaguucagggagga

SEQ ID NO: 3776 - RNA, 21 nt, Artificial Sequence
  Description of Artificial Sequence: Synthetic oligonucleotide
cucccugaacuucuucagcac

SEQ ID NO: 3777 - RNA, 21 nt, Artificial Sequence
  Description of Artificial Sequence: Synthetic oligonucleotide
cugaagaaguucagggaggag

SEQ ID NO: 3778 - RNA, 21 nt, Artificial Sequence
  Description of Artificial Sequence: Synthetic oligonucleotide
ccucccugaacuucuucagca

SEQ ID NO: 3779 - RNA, 21 nt, Artificial Sequence
  Description of Artificial Sequence: Synthetic oligonucleotide
ugaagaaguucagggaggagc

SEQ ID NO: 3780 - RNA, 21 nt, Artificial Sequence
  Description of Artificial Sequence: Synthetic oligonucleotide
uccucccugaacuucuucagc

SEQ ID NO: 3781 - RNA, 21 nt, Artificial Sequence
  Description of Artificial Sequence: Synthetic oligonucleotide
gaagaaguucagggaggagcu

SEQ ID NO: 3782 - RNA, 21 nt, Artificial Sequence
  Description of Artificial Sequence: Synthetic oligonucleotide
cuccucccugaacuucuucag

SEQ ID NO: 3783 - RNA, 21 nt, Artificial Sequence
  Description of Artificial Sequence: Synthetic oligonucleotide
aagaaguucagggaggagcug

SEQ ID NO: 3784 - RNA, 21 nt, Artificial Sequence
  Description of Artificial Sequence: Synthetic oligonucleotide
gcuccucccugaacuucuuca

SEQ ID NO: 3785 - RNA, 21 nt, Artificial Sequence
  Description of Artificial Sequence: Synthetic oligonucleotide
agaaguucagggaggagcugg

SEQ ID NO: 3786 - RNA, 21 nt, Artificial Sequence
  Description of Artificial Sequence: Synthetic oligonucleotide
agcuccucccugaacuucuuc

SEQ ID NO: 3787 - RNA, 21 nt, Artificial Sequence
  Description of Artificial Sequence: Synthetic oligonucleotide
gaaguucagggaggagcuggc

SEQ ID NO: 3788 - RNA, 21 nt, Artificial Sequence
  Description of Artificial Sequence: Synthetic oligonucleotide
cagcuccucccugaacuucuu

SEQ ID NO: 3789 - RNA, 21 nt, Artificial Sequence
  Description of Artificial Sequence: Synthetic oligonucleotide
aaguucagggaggagcuggcu

SEQ ID NO: 3790 - RNA, 21 nt, Artificial Sequence
  Description of Artificial Sequence: Synthetic oligonucleotide
ccagcuccucccugaacuucu

SEQ ID NO: 3791 - RNA, 21 nt, Artificial Sequence
  Description of Artificial Sequence: Synthetic oligonucleotide
aguucagggaggagcuggcug

SEQ ID NO: 3792 - RNA, 21 nt, Artificial Sequence
  Description of Artificial Sequence: Synthetic oligonucleotide
gccagcuccucccugaacuuc

SEQ ID NO: 3793 - RNA, 21 nt, Artificial Sequence
  Description of Artificial Sequence: Synthetic oligonucleotide
guucagggaggagcuggcugc

SEQ ID NO: 3794 - RNA, 21 nt, Artificial Sequence
  Description of Artificial Sequence: Synthetic oligonucleotide
agccagcuccucccugaacuu

SEQ ID NO: 3795 - RNA, 21 nt, Artificial Sequence
  Description of Artificial Sequence: Synthetic oligonucleotide
uucagggaggagcuggcugcc

SEQ ID NO: 3796 - RNA, 21 nt, Artificial Sequence
  Description of Artificial Sequence: Synthetic oligonucleotide
cagccagcuccucccugaacu

SEQ ID NO: 3797 - RNA, 21 nt, Artificial Sequence
  Description of Artificial Sequence: Synthetic oligonucleotide
ucagggaggagcuggcugccc

SEQ ID NO: 3798 - RNA, 21 nt, Artificial Sequence
  Description of Artificial Sequence: Synthetic oligonucleotide
gcagccagcuccucccugaac

SEQ ID NO: 3799 - RNA, 21 nt, Artificial Sequence
  Description of Artificial Sequence: Synthetic oligonucleotide
cagggaggagcuggcugcccu

SEQ ID NO: 3800 - RNA, 21 nt, Artificial Sequence
  Description of Artificial Sequence: Synthetic oligonucleotide
ggcagccagcuccucccugaa

SEQ ID NO: 3801 - RNA, 21 nt, Artificial Sequence
  Description of Artificial Sequence: Synthetic oligonucleotide
agggaggagcuggcugcccug

SEQ ID NO: 3802 - RNA, 21 nt, Artificial Sequence
  Description of Artificial Sequence: Synthetic oligonucleotide
gggcagccagcuccucccuga

SEQ ID NO: 3803 - RNA, 21 nt, Artificial Sequence
  Description of Artificial Sequence: Synthetic oligonucleotide
gggaggagcuggcugcccugg

SEQ ID NO: 3804 - RNA, 21 nt, Artificial Sequence
  Description of Artificial Sequence: Synthetic oligonucleotide
agggcagccagcuccucccug

SEQ ID NO: 3805 - RNA, 21 nt, Artificial Sequence
  Description of Artificial Sequence: Synthetic oligonucleotide
ggaggagcuggcugcccugga

SEQ ID NO: 3806 - RNA, 21 nt, Artificial Sequence
  Description of Artificial Sequence: Synthetic oligonucleotide
cagggcagccagcuccucccu

SEQ ID NO: 3807 - RNA, 21 nt, Artificial Sequence
  Description of Artificial Sequence: Synthetic oligonucleotide
gaggagcuggcugcccuggau

SEQ ID NO: 3808 - RNA, 21 nt, Artificial Sequence
  Description of Artificial Sequence: Synthetic oligonucleotide
ccagggcagccagcuccuccc

SEQ ID NO: 3809 - RNA, 21 nt, Artificial Sequence
  Description of Artificial Sequence: Synthetic oligonucleotide
aggagcuggcugcccuggaua

SEQ ID NO: 3810 - RNA, 21 nt, Artificial Sequence
  Description of Artificial Sequence: Synthetic oligonucleotide
uccagggcagccagcuccucc

SEQ ID NO: 3811 - RNA, 21 nt, Artificial Sequence
  Description of Artificial Sequence: Synthetic oligonucleotide
ggagcuggcugcccuggauaa

SEQ ID NO: 3812 - RNA, 21 nt, Artificial Sequence
  Description of Artificial Sequence: Synthetic oligonucleotide
auccagggcagccagcuccuc

SEQ ID NO: 3813 - RNA, 21 nt, Artificial Sequence
  Description of Artificial Sequence: Synthetic oligonucleotide
gagcuggcugcccuggauaag

SEQ ID NO: 3814 - RNA, 21 nt, Artificial Sequence
  Description of Artificial Sequence: Synthetic oligonucleotide
uauccagggcagccagcuccu

SEQ ID NO: 3815 - RNA, 21 nt, Artificial Sequence
  Description of Artificial Sequence: Synthetic oligonucleotide
agcuggcugcccuggauaagg

SEQ ID NO: 3816 - RNA, 21 nt, Artificial Sequence
  Description of Artificial Sequence: Synthetic oligonucleotide
uuauccagggcagccagcucc

SEQ ID NO: 3817 - RNA, 21 nt, Artificial Sequence
  Description of Artificial Sequence: Synthetic oligonucleotide
gcuggcugcccuggauaagga

SEQ ID NO: 3818 - RNA, 21 nt, Artificial Sequence
  Description of Artificial Sequence: Synthetic oligonucleotide
cuuauccagggcagccagcuc

SEQ ID NO: 3819 - RNA, 21 nt, Artificial Sequence
  Description of Artificial Sequence: Synthetic oligonucleotide
cuggcugcccuggauaaggaa

SEQ ID NO: 3820 - RNA, 21 nt, Artificial Sequence
  Description of Artificial Sequence: Synthetic oligonucleotide
ccuuauccagggcagccagcu

SEQ ID NO: 3821 - RNA, 21 nt, Artificial Sequence
  Description of Artificial Sequence: Synthetic oligonucleotide
uggcugcccuggauaaggaaa

SEQ ID NO: 3822 - RNA, 21 nt, Artificial Sequence
  Description of Artificial Sequence: Synthetic oligonucleotide
uccuuauccagggcagccagc

SEQ ID NO: 3823 - RNA, 21 nt, Artificial Sequence
  Description of Artificial Sequence: Synthetic oligonucleotide
ggcugcccuggauaaggaaau

SEQ ID NO: 3824 - RNA, 21 nt, Artificial Sequence
  Description of Artificial Sequence: Synthetic oligonucleotide
uuccuuauccagggcagccag

SEQ ID NO: 3825 - RNA, 21 nt, Artificial Sequence
  Description of Artificial Sequence: Synthetic oligonucleotide
gcugcccuggauaaggaaauu

SEQ ID NO: 3826 - RNA, 21 nt, Artificial Sequence
  Description of Artificial Sequence: Synthetic oligonucleotide
uuuccuuauccagggcagcca

SEQ ID NO: 3827 - RNA, 21 nt, Artificial Sequence
  Description of Artificial Sequence: Synthetic oligonucleotide
cugcccuggauaaggaaauug

SEQ ID NO: 3828 - RNA, 21 nt, Artificial Sequence
  Description of Artificial Sequence: Synthetic oligonucleotide
auuuccuuauccagggcagcc

SEQ ID NO: 3829 - RNA, 21 nt, Artificial Sequence
  Description of Artificial Sequence: Synthetic oligonucleotide
ugcccuggauaaggaaauuga

SEQ ID NO: 3830 - RNA, 21 nt, Artificial Sequence
  Description of Artificial Sequence: Synthetic oligonucleotide
aauuuccuuauccagggcagc

SEQ ID NO: 3831 - RNA, 21 nt, Artificial Sequence
  Description of Artificial Sequence: Synthetic oligonucleotide
gcccuggauaaggaaauugag

SEQ ID NO: 3832 - RNA, 21 nt, Artificial Sequence
  Description of Artificial Sequence: Synthetic oligonucleotide
caauuuccuuauccagggcag

SEQ ID NO: 3833 - RNA, 21 nt, Artificial Sequence
  Description of Artificial Sequence: Synthetic oligonucleotide
cccuggauaaggaaauugaga

SEQ ID NO: 3834 - RNA, 21 nt, Artificial Sequence
  Description of Artificial Sequence: Synthetic oligonucleotide
ucaauuuccuuauccagggca

SEQ ID NO: 3835 - RNA, 21 nt, Artificial Sequence
  Description of Artificial Sequence: Synthetic oligonucleotide
ccuggauaaggaaauugagau

SEQ ID NO: 3836 - RNA, 21 nt, Artificial Sequence
  Description of Artificial Sequence: Synthetic oligonucleotide
cucaauuuccuuauccagggc

SEQ ID NO: 3837 - RNA, 21 nt, Artificial Sequence
  Description of Artificial Sequence: Synthetic oligonucleotide
cuggauaaggaaauugagauc

SEQ ID NO: 3838 - RNA, 21 nt, Artificial Sequence
  Description of Artificial Sequence: Synthetic oligonucleotide
ucucaauuuccuuauccaggg

SEQ ID NO: 3839 - RNA, 21 nt, Artificial Sequence
  Description of Artificial Sequence: Synthetic oligonucleotide
uggauaaggaaauugagaucc

SEQ ID NO: 3840 - RNA, 21 nt, Artificial Sequence
  Description of Artificial Sequence: Synthetic oligonucleotide
aucucaauuuccuuauccagg

SEQ ID NO: 3841 - RNA, 21 nt, Artificial Sequence
  Description of Artificial Sequence: Synthetic oligonucleotide
ggauaaggaaauugagauccg

SEQ ID NO: 3842 - RNA, 21 nt, Artificial Sequence
  Description of Artificial Sequence: Synthetic oligonucleotide
gaucucaauuuccuuauccag

SEQ ID NO: 3843 - RNA, 21 nt, Artificial Sequence
  Description of Artificial Sequence: Synthetic oligonucleotide
gauaaggaaauugagauccgg

SEQ ID NO: 3844 - RNA, 21 nt, Artificial Sequence
  Description of Artificial Sequence: Synthetic oligonucleotide
ggaucucaauuuccuuaucca

SEQ ID NO: 3845 - RNA, 21 nt, Artificial Sequence
  Description of Artificial Sequence: Synthetic oligonucleotide
auaaggaaauugagauccgga

SEQ ID NO: 3846 - RNA, 21 nt, Artificial Sequence
  Description of Artificial Sequence: Synthetic oligonucleotide
cggaucucaauuuccuuaucc

SEQ ID NO: 3847 - RNA, 21 nt, Artificial Sequence
  Description of Artificial Sequence: Synthetic oligonucleotide
uaaggaaauugagauccggaa

SEQ ID NO: 3848 - RNA, 21 nt, Artificial Sequence
  Description of Artificial Sequence: Synthetic oligonucleotide
ccggaucucaauuuccuuauc

SEQ ID NO: 3849 - RNA, 21 nt, Artificial Sequence
  Description of Artificial Sequence: Synthetic oligonucleotide
aaggaaauugagauccggaau

SEQ ID NO: 3850 - RNA, 21 nt, Artificial Sequence
  Description of Artificial Sequence: Synthetic oligonucleotide
uccggaucucaauuuccuuau

SEQ ID NO: 3851 - RNA, 21 nt, Artificial Sequence
  Description of Artificial Sequence: Synthetic oligonucleotide
aggaaauugagauccggaaug

SEQ ID NO: 3852 - RNA, 21 nt, Artificial Sequence
  Description of Artificial Sequence: Synthetic oligonucleotide
uuccggaucucaauuuccuua

SEQ ID NO: 3853 - RNA, 21 nt, Artificial Sequence
  Description of Artificial Sequence: Synthetic oligonucleotide
ggaaauugagauccggaaugc

SEQ ID NO: 3854 - RNA, 21 nt, Artificial Sequence
  Description of Artificial Sequence: Synthetic oligonucleotide
auuccggaucucaauuuccuu

SEQ ID NO: 3855 - RNA, 21 nt, Artificial Sequence
  Description of Artificial Sequence: Synthetic oligonucleotide
gaaauugagauccggaaugca

SEQ ID NO: 3856 - RNA, 21 nt, Artificial Sequence
  Description of Artificial Sequence: Synthetic oligonucleotide
cauuccggaucucaauuuccu

SEQ ID NO: 3857 - RNA, 21 nt, Artificial Sequence
  Description of Artificial Sequence: Synthetic oligonucleotide
aaauugagauccggaaugcaa

SEQ ID NO: 3858 - RNA, 21 nt, Artificial Sequence
  Description of Artificial Sequence: Synthetic oligonucleotide
gcauuccggaucucaauuucc

SEQ ID NO: 3859 - RNA, 21 nt, Artificial Sequence
  Description of Artificial Sequence: Synthetic oligonucleotide
aauugagauccggaaugcaaa

SEQ ID NO: 3860 - RNA, 21 nt, Artificial Sequence
  Description of Artificial Sequence: Synthetic oligonucleotide
ugcauuccggaucucaauuuc

SEQ ID NO: 3861 - RNA, 21 nt, Artificial Sequence
  Description of Artificial Sequence: Synthetic oligonucleotide
auugagauccggaaugcaaag

SEQ ID NO: 3862 - RNA, 21 nt, Artificial Sequence
  Description of Artificial Sequence: Synthetic oligonucleotide
uugcauuccggaucucaauuu

SEQ ID NO: 3863 - RNA, 21 nt, Artificial Sequence
  Description of Artificial Sequence: Synthetic oligonucleotide
uugagauccggaaugcaaagc

SEQ ID NO: 3864 - RNA, 21 nt, Artificial Sequence
  Description of Artificial Sequence: Synthetic oligonucleotide
uuugcauuccggaucucaauu

SEQ ID NO: 3865 - RNA, 21 nt, Artificial Sequence
  Description of Artificial Sequence: Synthetic oligonucleotide
ugagauccggaaugcaaagcu

SEQ ID NO: 3866 - RNA, 21 nt, Artificial Sequence
  Description of Artificial Sequence: Synthetic oligonucleotide
cuuugcauuccggaucucaau

SEQ ID NO: 3867 - RNA, 21 nt, Artificial Sequence
  Description of Artificial Sequence: Synthetic oligonucleotide
gagauccggaaugcaaagcug

SEQ ID NO: 3868 - RNA, 21 nt, Artificial Sequence
  Description of Artificial Sequence: Synthetic oligonucleotide
gcuuugcauuccggaucucaa

SEQ ID NO: 3869 - RNA, 21 nt, Artificial Sequence
  Description of Artificial Sequence: Synthetic oligonucleotide
agauccggaaugcaaagcugg

SEQ ID NO: 3870 - RNA, 21 nt, Artificial Sequence
  Description of Artificial Sequence: Synthetic oligonucleotide
agcuuugcauuccggaucuca

SEQ ID NO: 3871 - RNA, 21 nt, Artificial Sequence
  Description of Artificial Sequence: Synthetic oligonucleotide
gauccggaaugcaaagcugga

SEQ ID NO: 3872 - RNA, 21 nt, Artificial Sequence
  Description of Artificial Sequence: Synthetic oligonucleotide
cagcuuugcauuccggaucuc

SEQ ID NO: 3873 - RNA, 21 nt, Artificial Sequence
  Description of Artificial Sequence: Synthetic oligonucleotide
auccggaaugcaaagcuggac

SEQ ID NO: 3874 - RNA, 21 nt, Artificial Sequence
  Description of Artificial Sequence: Synthetic oligonucleotide
ccagcuuugcauuccggaucu

SEQ ID NO: 3875 - RNA, 21 nt, Artificial Sequence
  Description of Artificial Sequence: Synthetic oligonucleotide
uccggaaugcaaagcuggaca

SEQ ID NO: 3876 - RNA, 21 nt, Artificial Sequence
  Description of Artificial Sequence: Synthetic oligonucleotide
uccagcuuugcauuccggauc

SEQ ID NO: 3877 - RNA, 21 nt, Artificial Sequence
  Description of Artificial Sequence: Synthetic oligonucleotide
ccggaaugcaaagcuggacau

SEQ ID NO: 3878 - RNA, 21 nt, Artificial Sequence
  Description of Artificial Sequence: Synthetic oligonucleotide
guccagcuuugcauuccggau

SEQ ID NO: 3879 - RNA, 21 nt, Artificial Sequence
  Description of Artificial Sequence: Synthetic oligonucleotide
cggaaugcaaagcuggacaug

SEQ ID NO: 3880 - RNA, 21 nt, Artificial Sequence
  Description of Artificial Sequence: Synthetic oligonucleotide
uguccagcuuugcauuccgga

SEQ ID NO: 3881 - RNA, 21 nt, Artificial Sequence
  Description of Artificial Sequence: Synthetic oligonucleotide
ggaaugcaaagcuggacaugc

SEQ ID NO: 3882 - RNA, 21 nt, Artificial Sequence
  Description of Artificial Sequence: Synthetic oligonucleotide
auguccagcuuugcauuccgg

SEQ ID NO: 3883 - RNA, 21 nt, Artificial Sequence
  Description of Artificial Sequence: Synthetic oligonucleotide
gaaugcaaagcuggacaugcc

SEQ ID NO: 3884 - RNA, 21 nt, Artificial Sequence
  Description of Artificial Sequence: Synthetic oligonucleotide
cauguccagcuuugcauuccg

SEQ ID NO: 3885 - RNA, 21 nt, Artificial Sequence
  Description of Artificial Sequence: Synthetic oligonucleotide
aaugcaaagcuggacaugccc

SEQ ID NO: 3886 - RNA, 21 nt, Artificial Sequence
  Description of Artificial Sequence: Synthetic oligonucleotide
gcauguccagcuuugcauucc

SEQ ID NO: 3887 - RNA, 21 nt, Artificial Sequence
  Description of Artificial Sequence: Synthetic oligonucleotide
augcaaagcuggacaugcccu

SEQ ID NO: 3888 - RNA, 21 nt, Artificial Sequence
  Description of Artificial Sequence: Synthetic oligonucleotide
ggcauguccagcuuugcauuc

SEQ ID NO: 3889 - RNA, 21 nt, Artificial Sequence
  Description of Artificial Sequence: Synthetic oligonucleotide
ugcaaagcuggacaugcccua

SEQ ID NO: 3890 - RNA, 21 nt, Artificial Sequence
  Description of Artificial Sequence: Synthetic oligonucleotide
gggcauguccagcuuugcauu

SEQ ID NO: 3891 - RNA, 21 nt, Artificial Sequence
  Description of Artificial Sequence: Synthetic oligonucleotide
gcaaagcuggacaugcccuac

SEQ ID NO: 3892 - RNA, 21 nt, Artificial Sequence
  Description of Artificial Sequence: Synthetic oligonucleotide
agggcauguccagcuuugcau

SEQ ID NO: 3893 - RNA, 21 nt, Artificial Sequence
  Description of Artificial Sequence: Synthetic oligonucleotide
caaagcuggacaugcccuacg

SEQ ID NO: 3894 - RNA, 21 nt, Artificial Sequence
  Description of Artificial Sequence: Synthetic oligonucleotide
uagggcauguccagcuuugca

SEQ ID NO: 3895 - RNA, 21 nt, Artificial Sequence
  Description of Artificial Sequence: Synthetic oligonucleotide
aaagcuggacaugcccuacga

SEQ ID NO: 3896 - RNA, 21 nt, Artificial Sequence
  Description of Artificial Sequence: Synthetic oligonucleotide
guagggcauguccagcuuugc

SEQ ID NO: 3897 - RNA, 21 nt, Artificial Sequence
  Description of Artificial Sequence: Synthetic oligonucleotide
aagcuggacaugcccuacgag

SEQ ID NO: 3898 - RNA, 21 nt, Artificial Sequence
  Description of Artificial Sequence: Synthetic oligonucleotide
cguagggcauguccagcuuug

SEQ ID NO: 3899 - RNA, 21 nt, Artificial Sequence
  Description of Artificial Sequence: Synthetic oligonucleotide
agcuggacaugcccuacgagu

SEQ ID NO: 3900 - RNA, 21 nt, Artificial Sequence
  Description of Artificial Sequence: Synthetic oligonucleotide
ucguagggcauguccagcuuu

SEQ ID NO: 3901 - RNA, 21 nt, Artificial Sequence
  Description of Artificial Sequence: Synthetic oligonucleotide
gcuggacaugcccuacgagua

SEQ ID NO: 3902 - RNA, 21 nt, Artificial Sequence
  Description of Artificial Sequence: Synthetic oligonucleotide
cucguagggcauguccagcuu

SEQ ID NO: 3903 - RNA, 21 nt, Artificial Sequence
  Description of Artificial Sequence: Synthetic oligonucleotide
cuggacaugcccuacgaguac

SEQ ID NO: 3904 - RNA, 21 nt, Artificial Sequence
  Description of Artificial Sequence: Synthetic oligonucleotide
acucguagggcauguccagcu

SEQ ID NO: 3905 - RNA, 21 nt, Artificial Sequence
  Description of Artificial Sequence: Synthetic oligonucleotide
uggacaugcccuacgaguacc

SEQ ID NO: 3906 - RNA, 21 nt, Artificial Sequence
  Description of Artificial Sequence: Synthetic oligonucleotide
uacucguagggcauguccagc

SEQ ID NO: 3907 - RNA, 21 nt, Artificial Sequence
  Description of Artificial Sequence: Synthetic oligonucleotide
ggacaugcccuacgaguaccu

SEQ ID NO: 3908 - RNA, 21 nt, Artificial Sequence
  Description of Artificial Sequence: Synthetic oligonucleotide
guacucguagggcauguccag

SEQ ID NO: 3909 - RNA, 21 nt, Artificial Sequence
  Description of Artificial Sequence: Synthetic oligonucleotide
gacaugcccuacgaguaccug

SEQ ID NO: 3910 - RNA, 21 nt, Artificial Sequence
  Description of Artificial Sequence: Synthetic oligonucleotide
gguacucguagggcaugucca

SEQ ID NO: 3911 - RNA, 21 nt, Artificial Sequence
  Description of Artificial Sequence: Synthetic oligonucleotide
acaugcccuacgaguaccugc

SEQ ID NO: 3912 - RNA, 21 nt, Artificial Sequence
  Description of Artificial Sequence: Synthetic oligonucleotide
agguacucguagggcaugucc

SEQ ID NO: 3913 - RNA, 21 nt, Artificial Sequence
  Description of Artificial Sequence: Synthetic oligonucleotide
caugcccuacgaguaccugcg

SEQ ID NO: 3914 - RNA, 21 nt, Artificial Sequence
  Description of Artificial Sequence: Synthetic oligonucleotide
cagguacucguagggcauguc

SEQ ID NO: 3915 - RNA, 21 nt, Artificial Sequence
  Description of Artificial Sequence: Synthetic oligonucleotide
augcccuacgaguaccugcgg

SEQ ID NO: 3916 - RNA, 21 nt, Artificial Sequence
  Description of Artificial Sequence: Synthetic oligonucleotide
gcagguacucguagggcaugu

SEQ ID NO: 3917 - RNA, 21 nt, Artificial Sequence
  Description of Artificial Sequence: Synthetic oligonucleotide
ugcccuacgaguaccugcggc

SEQ ID NO: 3918 - RNA, 21 nt, Artificial Sequence
  Description of Artificial Sequence: Synthetic oligonucleotide
cgcagguacucguagggcaug

SEQ ID NO: 3919 - RNA, 21 nt, Artificial Sequence
  Description of Artificial Sequence: Synthetic oligonucleotide
gcccuacgaguaccugcggcc

SEQ ID NO: 3920 - RNA, 21 nt, Artificial Sequence
  Description of Artificial Sequence: Synthetic oligonucleotide
ccgcagguacucguagggcau

SEQ ID NO: 3921 - RNA, 21 nt, Artificial Sequence
  Description of Artificial Sequence: Synthetic oligonucleotide
cccuacgaguaccugcggccc

SEQ ID NO: 3922 - RNA, 21 nt, Artificial Sequence
  Description of Artificial Sequence: Synthetic oligonucleotide
gccgcagguacucguagggca

SEQ ID NO: 3923 - RNA, 21 nt, Artificial Sequence
  Description of Artificial Sequence: Synthetic oligonucleotide
ccuacgaguaccugcggccca

SEQ ID NO: 3924 - RNA, 21 nt, Artificial Sequence
  Description of Artificial Sequence: Synthetic oligonucleotide
ggccgcagguacucguagggc

SEQ ID NO: 3925 - RNA, 21 nt, Artificial Sequence
  Description of Artificial Sequence: Synthetic oligonucleotide
cuacgaguaccugcggcccag

SEQ ID NO: 3926 - RNA, 21 nt, Artificial Sequence
  Description of Artificial Sequence: Synthetic oligonucleotide
gggccgcagguacucguaggg

SEQ ID NO: 3927 - RNA, 21 nt, Artificial Sequence
  Description of Artificial Sequence: Synthetic oligonucleotide
uacgaguaccugcggcccagc

SEQ ID NO: 3928 - RNA, 21 nt, Artificial Sequence
  Description of Artificial Sequence: Synthetic oligonucleotide
ugggccgcagguacucguagg

SEQ ID NO: 3929 - RNA, 21 nt, Artificial Sequence
  Description of Artificial Sequence: Synthetic oligonucleotide
acgaguaccugcggcccagcg

SEQ ID NO: 3930 - RNA, 21 nt, Artificial Sequence
  Description of Artificial Sequence: Synthetic oligonucleotide
cugggccgcagguacucguag

SEQ ID NO: 3931 - RNA, 21 nt, Artificial Sequence
  Description of Artificial Sequence: Synthetic oligonucleotide
cgaguaccugcggcccagcgu

SEQ ID NO: 3932 - RNA, 21 nt, Artificial Sequence
  Description of Artificial Sequence: Synthetic oligonucleotide
gcugggccgcagguacucgua

SEQ ID NO: 3933 - RNA, 21 nt, Artificial Sequence
  Description of Artificial Sequence: Synthetic oligonucleotide
gaguaccugcggcccagcgug

SEQ ID NO: 3934 - RNA, 21 nt, Artificial Sequence
  Description of Artificial Sequence: Synthetic oligonucleotide
cgcugggccgcagguacucgu

SEQ ID NO: 3935 - RNA, 21 nt, Artificial Sequence
  Description of Artificial Sequence: Synthetic oligonucleotide
aguaccugcggcccagcgugg

SEQ ID NO: 3936 - RNA, 21 nt, Artificial Sequence
  Description of Artificial Sequence: Synthetic oligonucleotide
acgcugggccgcagguacucg

SEQ ID NO: 3937 - RNA, 21 nt, Artificial Sequence
  Description of Artificial Sequence: Synthetic oligonucleotide
guaccugcggcccagcguggu

SEQ ID NO: 3938 - RNA, 21 nt, Artificial Sequence
  Description of Artificial Sequence: Synthetic oligonucleotide
cacgcugggccgcagguacuc

SEQ ID NO: 3939 - RNA, 21 nt, Artificial Sequence
  Description of Artificial Sequence: Synthetic oligonucleotide
uaccugcggcccagcguggug

SEQ ID NO: 3940 - RNA, 21 nt, Artificial Sequence
  Description of Artificial Sequence: Synthetic oligonucleotide
ccacgcugggccgcagguacu

SEQ ID NO: 3941 - RNA, 21 nt, Artificial Sequence
  Description of Artificial Sequence: Synthetic oligonucleotide
accugcggcccagcguggugg

SEQ ID NO: 3942 - RNA, 21 nt, Artificial Sequence
  Description of Artificial Sequence: Synthetic oligonucleotide
accacgcugggccgcagguac

SEQ ID NO: 3943 - RNA, 21 nt, Artificial Sequence
  Description of Artificial Sequence: Synthetic oligonucleotide
ccugcggcccagcguggugga

SEQ ID NO: 3944 - RNA, 21 nt, Artificial Sequence
  Description of Artificial Sequence: Synthetic oligonucleotide
caccacgcugggccgcaggua

SEQ ID NO: 3945 - RNA, 21 nt, Artificial Sequence
  Description of Artificial Sequence: Synthetic oligonucleotide
cugcggcccagcgugguggaa

SEQ ID NO: 3946 - RNA, 21 nt, Artificial Sequence
  Description of Artificial Sequence: Synthetic oligonucleotide
ccaccacgcugggccgcaggu

SEQ ID NO: 3947 - RNA, 21 nt, Artificial Sequence
  Description of Artificial Sequence: Synthetic oligonucleotide
ugcggcccagcgugguggaaa

SEQ ID NO: 3948 - RNA, 21 nt, Artificial Sequence
  Description of Artificial Sequence: Synthetic oligonucleotide
uccaccacgcugggccgcagg

SEQ ID NO: 3949 - RNA, 21 nt, Artificial Sequence
  Description of Artificial Sequence: Synthetic oligonucleotide
gcggcccagcgugguggaaaa

SEQ ID NO: 3950 - RNA, 21 nt, Artificial Sequence
  Description of Artificial Sequence: Synthetic oligonucleotide
uuccaccacgcugggccgcag

SEQ ID NO: 3951 - RNA, 21 nt, Artificial Sequence
  Description of Artificial Sequence: Synthetic oligonucleotide
cggcccagcgugguggaaaac

SEQ ID NO: 3952 - RNA, 21 nt, Artificial Sequence
  Description of Artificial Sequence: Synthetic oligonucleotide
uuuccaccacgcugggccgca

SEQ ID NO: 3953 - RNA, 21 nt, Artificial Sequence
  Description of Artificial Sequence: Synthetic oligonucleotide
ggcccagcgugguggaaaaca

SEQ ID NO: 3954 - RNA, 21 nt, Artificial Sequence
  Description of Artificial Sequence: Synthetic oligonucleotide
uuuuccaccacgcugggccgc

SEQ ID NO: 3955 - RNA, 21 nt, Artificial Sequence
  Description of Artificial Sequence: Synthetic oligonucleotide
gcccagcgugguggaaaacag

SEQ ID NO: 3956 - RNA, 21 nt, Artificial Sequence
  Description of Artificial Sequence: Synthetic oligonucleotide
guuuuccaccacgcugggccg

SEQ ID NO: 3957 - RNA, 21 nt, Artificial Sequence
  Description of Artificial Sequence: Synthetic oligonucleotide
cccagcgugguggaaaacagu

SEQ ID NO: 3958 - RNA, 21 nt, Artificial Sequence
  Description of Artificial Sequence: Synthetic oligonucleotide
uguuuuccaccacgcugggcc

SEQ ID NO: 3959 - RNA, 21 nt, Artificial Sequence
  Description of Artificial Sequence: Synthetic oligonucleotide
ccagcgugguggaaaacagug

SEQ ID NO: 3960 - RNA, 21 nt, Artificial Sequence
  Description of Artificial Sequence: Synthetic oligonucleotide
cuguuuuccaccacgcugggc

SEQ ID NO: 3961 - RNA, 21 nt, Artificial Sequence
  Description of Artificial Sequence: Synthetic oligonucleotide
cagcgugguggaaaacagugu

SEQ ID NO: 3962 - RNA, 21 nt, Artificial Sequence
  Description of Artificial Sequence: Synthetic oligonucleotide
acuguuuuccaccacgcuggg

SEQ ID NO: 3963 - RNA, 21 nt, Artificial Sequence
  Description of Artificial Sequence: Synthetic oligonucleotide
agcgugguggaaaacagugug

SEQ ID NO: 3964 - RNA, 21 nt, Artificial Sequence
  Description of Artificial Sequence: Synthetic oligonucleotide
cacuguuuuccaccacgcugg

SEQ ID NO: 3965 - RNA, 21 nt, Artificial Sequence
  Description of Artificial Sequence: Synthetic oligonucleotide
gcgugguggaaaacagugugg

SEQ ID NO: 3966 - RNA, 21 nt, Artificial Sequence
  Description of Artificial Sequence: Synthetic oligonucleotide
acacuguuuuccaccacgcug

SEQ ID NO: 3967 - RNA, 21 nt, Artificial Sequence
  Description of Artificial Sequence: Synthetic oligonucleotide
cgugguggaaaacaguguggc

SEQ ID NO: 3968 - RNA, 21 nt, Artificial Sequence
  Description of Artificial Sequence: Synthetic oligonucleotide
cacacuguuuuccaccacgcu

SEQ ID NO: 3969 - RNA, 21 nt, Artificial Sequence
  Description of Artificial Sequence: Synthetic oligonucleotide
gugguggaaaacaguguggcc

SEQ ID NO: 3970 - RNA, 21 nt, Artificial Sequence
  Description of Artificial Sequence: Synthetic oligonucleotide
ccacacuguuuuccaccacgc

SEQ ID NO: 3971 - RNA, 21 nt, Artificial Sequence
  Description of Artificial Sequence: Synthetic oligonucleotide
ugguggaaaacaguguggcca

SEQ ID NO: 3972 - RNA, 21 nt, Artificial Sequence
  Description of Artificial Sequence: Synthetic oligonucleotide
gccacacuguuuuccaccacg

SEQ ID NO: 3973 - RNA, 21 nt, Artificial Sequence
  Description of Artificial Sequence: Synthetic oligonucleotide
gguggaaaacaguguggccau

SEQ ID NO: 3974 - RNA, 21 nt, Artificial Sequence
  Description of Artificial Sequence: Synthetic oligonucleotide
ggccacacuguuuuccaccac

SEQ ID NO: 3975 - RNA, 21 nt, Artificial Sequence
  Description of Artificial Sequence: Synthetic oligonucleotide
guggaaaacaguguggccauc

SEQ ID NO: 3976 - RNA, 21 nt, Artificial Sequence
  Description of Artificial Sequence: Synthetic oligonucleotide
uggccacacuguuuuccacca

SEQ ID NO: 3977 - RNA, 21 nt, Artificial Sequence
  Description of Artificial Sequence: Synthetic oligonucleotide
uggaaaacaguguggccaucu

SEQ ID NO: 3978 - RNA, 21 nt, Artificial Sequence
  Description of Artificial Sequence: Synthetic oligonucleotide
auggccacacuguuuuccacc

SEQ ID NO: 3979 - RNA, 21 nt, Artificial Sequence
  Description of Artificial Sequence: Synthetic oligonucleotide
ggaaaacaguguggccaucua

SEQ ID NO: 3980 - RNA, 21 nt, Artificial Sequence
  Description of Artificial Sequence: Synthetic oligonucleotide
gauggccacacuguuuuccac

SEQ ID NO: 3981 - RNA, 21 nt, Artificial Sequence
  Description of Artificial Sequence: Synthetic oligonucleotide
gaaaacaguguggccaucuaa

SEQ ID NO: 3982 - RNA, 21 nt, Artificial Sequence
  Description of Artificial Sequence: Synthetic oligonucleotide
agauggccacacuguuuucca

SEQ ID NO: 3983 - RNA, 21 nt, Artificial Sequence
  Description of Artificial Sequence: Synthetic oligonucleotide
aaaacaguguggccaucuaag

SEQ ID NO: 3984 - RNA, 21 nt, Artificial Sequence
  Description of Artificial Sequence: Synthetic oligonucleotide
uagauggccacacuguuuucc

SEQ ID NO: 3985 - RNA, 21 nt, Artificial Sequence
  Description of Artificial Sequence: Synthetic oligonucleotide
aaacaguguggccaucuaagc

SEQ ID NO: 3986 - RNA, 21 nt, Artificial Sequence
  Description of Artificial Sequence: Synthetic oligonucleotide
uuagauggccacacuguuuuc

SEQ ID NO: 3987 - RNA, 21 nt, Artificial Sequence
  Description of Artificial Sequence: Synthetic oligonucleotide
aacaguguggccaucuaagcg

SEQ ID NO: 3988 - RNA, 21 nt, Artificial Sequence
  Description of Artificial Sequence: Synthetic oligonucleotide
cuuagauggccacacuguuuu

SEQ ID NO: 3989 - RNA, 21 nt, Artificial Sequence
  Description of Artificial Sequence: Synthetic oligonucleotide
acaguguggccaucuaagcgu

SEQ ID NO: 3990 - RNA, 21 nt, Artificial Sequence
  Description of Artificial Sequence: Synthetic oligonucleotide
gcuuagauggccacacuguuu

SEQ ID NO: 3991 - RNA, 21 nt, Artificial Sequence
  Description of Artificial Sequence: Synthetic oligonucleotide
caguguggccaucuaagcguc

SEQ ID NO: 3992 - RNA, 21 nt, Artificial Sequence
  Description of Artificial Sequence: Synthetic oligonucleotide
cgcuuagauggccacacuguu

SEQ ID NO: 3993 - RNA, 21 nt, Artificial Sequence
  Description of Artificial Sequence: Synthetic oligonucleotide
aguguggccaucuaagcgucg

SEQ ID NO: 3994 - RNA, 21 nt, Artificial Sequence
  Description of Artificial Sequence: Synthetic oligonucleotide
acgcuuagauggccacacugu

SEQ ID NO: 3995 - RNA, 21 nt, Artificial Sequence
  Description of Artificial Sequence: Synthetic oligonucleotide
guguggccaucuaagcgucgc

SEQ ID NO: 3996 - RNA, 21 nt, Artificial Sequence
  Description of Artificial Sequence: Synthetic oligonucleotide
gacgcuuagauggccacacug

SEQ ID NO: 3997 - RNA, 21 nt, Artificial Sequence
  Description of Artificial Sequence: Synthetic oligonucleotide
uguggccaucuaagcgucgcc

SEQ ID NO: 3998 - RNA, 21 nt, Artificial Sequence
  Description of Artificial Sequence: Synthetic oligonucleotide
cgacgcuuagauggccacacu

SEQ ID NO: 3999 - RNA, 21 nt, Artificial Sequence
  Description of Artificial Sequence: Synthetic oligonucleotide
guggccaucuaagcgucgcca

SEQ ID NO: 4000 - RNA, 21 nt, Artificial Sequence
  Description of Artificial Sequence: Synthetic oligonucleotide
gcgacgcuuagauggccacac

SEQ ID NO: 4001 - RNA, 21 nt, Artificial Sequence
  Description of Artificial Sequence: Synthetic oligonucleotide
uggccaucuaagcgucgccac

SEQ ID NO: 4002 - RNA, 21 nt, Artificial Sequence
  Description of Artificial Sequence: Synthetic oligonucleotide
ggcgacgcuuagauggccaca

SEQ ID NO: 4003 - RNA, 21 nt, Artificial Sequence
  Description of Artificial Sequence: Synthetic oligonucleotide
ggccaucuaagcgucgccacc

SEQ ID NO: 4004 - RNA, 21 nt, Artificial Sequence
  Description of Artificial Sequence: Synthetic oligonucleotide
uggcgacgcuuagauggccac

SEQ ID NO: 4005 - RNA, 21 nt, Artificial Sequence
  Description of Artificial Sequence: Synthetic oligonucleotide
gccaucuaagcgucgccaccc

SEQ ID NO: 4006 - RNA, 21 nt, Artificial Sequence
  Description of Artificial Sequence: Synthetic oligonucleotide
guggcgacgcuuagauggcca

SEQ ID NO: 4007 - RNA, 21 nt, Artificial Sequence
  Description of Artificial Sequence: Synthetic oligonucleotide
ccaucuaagcgucgccacccu

SEQ ID NO: 4008 - RNA, 21 nt, Artificial Sequence
  Description of Artificial Sequence: Synthetic oligonucleotide
gguggcgacgcuuagauggcc

SEQ ID NO: 4009 - RNA, 21 nt, Artificial Sequence
  Description of Artificial Sequence: Synthetic oligonucleotide
caucuaagcgucgccacccuu

SEQ ID NO: 4010 - RNA, 21 nt, Artificial Sequence
  Description of Artificial Sequence: Synthetic oligonucleotide
ggguggcgacgcuuagauggc

SEQ ID NO: 4011 - RNA, 21 nt, Artificial Sequence
  Description of Artificial Sequence: Synthetic oligonucleotide
aucuaagcgucgccacccuuu

SEQ ID NO: 4012 - RNA, 21 nt, Artificial Sequence
  Description of Artificial Sequence: Synthetic oligonucleotide
aggguggcgacgcuuagaugg

SEQ ID NO: 4013 - RNA, 21 nt, Artificial Sequence
  Description of Artificial Sequence: Synthetic oligonucleotide
ucuaagcgucgccacccuuug

SEQ ID NO: 4014 - RNA, 21 nt, Artificial Sequence
  Description of Artificial Sequence: Synthetic oligonucleotide
aaggguggcgacgcuuagaug

SEQ ID NO: 4015 - RNA, 21 nt, Artificial Sequence
  Description of Artificial Sequence: Synthetic oligonucleotide
cuaagcgucgccacccuuugg

SEQ ID NO: 4016 - RNA, 21 nt, Artificial Sequence
  Description of Artificial Sequence: Synthetic oligonucleotide
aaaggguggcgacgcuuagau

SEQ ID NO: 4017 - RNA, 21 nt, Artificial Sequence
  Description of Artificial Sequence: Synthetic oligonucleotide
uaagcgucgccacccuuuggu

SEQ ID NO: 4018 - RNA, 21 nt, Artificial Sequence
  Description of Artificial Sequence: Synthetic oligonucleotide
caaaggguggcgacgcuuaga

SEQ ID NO: 4019 - RNA, 21 nt, Artificial Sequence
  Description of Artificial Sequence: Synthetic oligonucleotide
aagcgucgccacccuuugguu

SEQ ID NO: 4020 - RNA, 21 nt, Artificial Sequence
  Description of Artificial Sequence: Synthetic oligonucleotide
ccaaaggguggcgacgcuuag

SEQ ID NO: 4021 - RNA, 21 nt, Artificial Sequence
  Description of Artificial Sequence: Synthetic oligonucleotide
agcgucgccacccuuugguua

SEQ ID NO: 4022 - RNA, 21 nt, Artificial Sequence
  Description of Artificial Sequence: Synthetic oligonucleotide
accaaaggguggcgacgcuua

SEQ ID NO: 4023 - RNA, 21 nt, Artificial Sequence
  Description of Artificial Sequence: Synthetic oligonucleotide
gcgucgccacccuuugguuau

SEQ ID NO: 4024 - RNA, 21 nt, Artificial Sequence
  Description of Artificial Sequence: Synthetic oligonucleotide
aaccaaaggguggcgacgcuu

SEQ ID NO: 4025 - RNA, 21 nt, Artificial Sequence
  Description of Artificial Sequence: Synthetic oligonucleotide
cgucgccacccuuugguuauu

SEQ ID NO: 4026 - RNA, 21 nt, Artificial Sequence
  Description of Artificial Sequence: Synthetic oligonucleotide
uaaccaaaggguggcgacgcu

SEQ ID NO: 4027 - RNA, 21 nt, Artificial Sequence
  Description of Artificial Sequence: Synthetic oligonucleotide
gucgccacccuuugguuauuu

SEQ ID NO: 4028 - RNA, 21 nt, Artificial Sequence
  Description of Artificial Sequence: Synthetic oligonucleotide
auaaccaaaggguggcgacgc

SEQ ID NO: 4029 - RNA, 21 nt, Artificial Sequence
  Description of Artificial Sequence: Synthetic oligonucleotide
ucgccacccuuugguuauuuc

SEQ ID NO: 4030 - RNA, 21 nt, Artificial Sequence
  Description of Artificial Sequence: Synthetic oligonucleotide
aauaaccaaaggguggcgacg

SEQ ID NO: 4031 - RNA, 21 nt, Artificial Sequence
  Description of Artificial Sequence: Synthetic oligonucleotide
cgccacccuuugguuauuuca

SEQ ID NO: 4032 - RNA, 21 nt, Artificial Sequence
  Description of Artificial Sequence: Synthetic oligonucleotide
aaauaaccaaaggguggcgac

SEQ ID NO: 4033 - RNA, 21 nt, Artificial Sequence
  Description of Artificial Sequence: Synthetic oligonucleotide
gccacccuuugguuauuucag

SEQ ID NO: 4034 - RNA, 21 nt, Artificial Sequence
  Description of Artificial Sequence: Synthetic oligonucleotide
gaaauaaccaaaggguggcga

SEQ ID NO: 4035 - RNA, 21 nt, Artificial Sequence
  Description of Artificial Sequence: Synthetic oligonucleotide
ccacccuuugguuauuucagc

SEQ ID NO: 4036 - RNA, 21 nt, Artificial Sequence
  Description of Artificial Sequence: Synthetic oligonucleotide
ugaaauaaccaaaggguggcg

SEQ ID NO: 4037 - RNA, 21 nt, Artificial Sequence
  Description of Artificial Sequence: Synthetic oligonucleotide
cacccuuugguuauuucagcc

SEQ ID NO: 4038 - RNA, 21 nt, Artificial Sequence
  Description of Artificial Sequence: Synthetic oligonucleotide
cugaaauaaccaaaggguggc

SEQ ID NO: 4039 - RNA, 21 nt, Artificial Sequence
  Description of Artificial Sequence: Synthetic oligonucleotide
acccuuugguuauuucagccc

SEQ ID NO: 4040 - RNA, 21 nt, Artificial Sequence
  Description of Artificial Sequence: Synthetic oligonucleotide
gcugaaauaaccaaagggugg

SEQ ID NO: 4041 - RNA, 21 nt, Artificial Sequence
  Description of Artificial Sequence: Synthetic oligonucleotide
cccuuugguuauuucagcccc

SEQ ID NO: 4042 - RNA, 21 nt, Artificial Sequence
  Description of Artificial Sequence: Synthetic oligonucleotide
ggcugaaauaaccaaagggug

SEQ ID NO: 4043 - RNA, 21 nt, Artificial Sequence
  Description of Artificial Sequence: Synthetic oligonucleotide
ccuuugguuauuucagccccc

SEQ ID NO: 4044 - RNA, 21 nt, Artificial Sequence
  Description of Artificial Sequence: Synthetic oligonucleotide
gggcugaaauaaccaaagggu

SEQ ID NO: 4045 - RNA, 21 nt, Artificial Sequence
  Description of Artificial Sequence: Synthetic oligonucleotide
cuuugguuauuucagccccca

SEQ ID NO: 4046 - RNA, 21 nt, Artificial Sequence
  Description of Artificial Sequence: Synthetic oligonucleotide
ggggcugaaauaaccaaaggg

SEQ ID NO: 4047 - RNA, 21 nt, Artificial Sequence
  Description of Artificial Sequence: Synthetic oligonucleotide
uuugguuauuucagcccccau

SEQ ID NO: 4048 - RNA, 21 nt, Artificial Sequence
  Description of Artificial Sequence: Synthetic oligonucleotide
gggggcugaaauaaccaaagg

SEQ ID NO: 4049 - RNA, 21 nt, Artificial Sequence
  Description of Artificial Sequence: Synthetic oligonucleotide
uugguuauuucagcccccauc

SEQ ID NO: 4050 - RNA, 21 nt, Artificial Sequence
  Description of Artificial Sequence: Synthetic oligonucleotide
ugggggcugaaauaaccaaag

SEQ ID NO: 4051 - RNA, 21 nt, Artificial Sequence
  Description of Artificial Sequence: Synthetic oligonucleotide
ugguuauuucagcccccauca

SEQ ID NO: 4052 - RNA, 21 nt, Artificial Sequence
  Description of Artificial Sequence: Synthetic oligonucleotide
augggggcugaaauaaccaaa

SEQ ID NO: 4053 - RNA, 21 nt, Artificial Sequence
  Description of Artificial Sequence: Synthetic oligonucleotide
gguuauuucagcccccaucac

SEQ ID NO: 4054 - RNA, 21 nt, Artificial Sequence
  Description of Artificial Sequence: Synthetic oligonucleotide
gaugggggcugaaauaaccaa

SEQ ID NO: 4055 - RNA, 21 nt, Artificial Sequence
  Description of Artificial Sequence: Synthetic oligonucleotide
guuauuucagcccccaucacc

SEQ ID NO: 4056 - RNA, 21 nt, Artificial Sequence
  Description of Artificial Sequence: Synthetic oligonucleotide
ugaugggggcugaaauaacca

SEQ ID NO: 4057 - RNA, 21 nt, Artificial Sequence
  Description of Artificial Sequence: Synthetic oligonucleotide
uuauuucagcccccaucaccc

SEQ ID NO: 4058 - RNA, 21 nt, Artificial Sequence
  Description of Artificial Sequence: Synthetic oligonucleotide
gugaugggggcugaaauaacc

SEQ ID NO: 4059 - RNA, 21 nt, Artificial Sequence
  Description of Artificial Sequence: Synthetic oligonucleotide
uauuucagcccccaucaccca

SEQ ID NO: 4060 - RNA, 21 nt, Artificial Sequence
  Description of Artificial Sequence: Synthetic oligonucleotide
ggugaugggggcugaaauaac

SEQ ID NO: 4061 - RNA, 21 nt, Artificial Sequence
  Description of Artificial Sequence: Synthetic oligonucleotide
auuucagcccccaucacccaa

SEQ ID NO: 4062 - RNA, 21 nt, Artificial Sequence
  Description of Artificial Sequence: Synthetic oligonucleotide
gggugaugggggcugaaauaa

SEQ ID NO: 4063 - RNA, 21 nt, Artificial Sequence
  Description of Artificial Sequence: Synthetic oligonucleotide
uuucagcccccaucacccaag

SEQ ID NO: 4064 - RNA, 21 nt, Artificial Sequence
  Description of Artificial Sequence: Synthetic oligonucleotide
ugggugaugggggcugaaaua

SEQ ID NO: 4065 - RNA, 21 nt, Artificial Sequence
  Description of Artificial Sequence: Synthetic oligonucleotide
uucagcccccaucacccaagc

SEQ ID NO: 4066 - RNA, 21 nt, Artificial Sequence
  Description of Artificial Sequence: Synthetic oligonucleotide
uugggugaugggggcugaaau

SEQ ID NO: 4067 - RNA, 21 nt, Artificial Sequence
  Description of Artificial Sequence: Synthetic oligonucleotide
ucagcccccaucacccaagcc

SEQ ID NO: 4068 - RNA, 21 nt, Artificial Sequence
  Description of Artificial Sequence: Synthetic oligonucleotide
cuugggugaugggggcugaaa

SEQ ID NO: 4069 - RNA, 21 nt, Artificial Sequence
  Description of Artificial Sequence: Synthetic oligonucleotide
cagcccccaucacccaagcca

SEQ ID NO: 4070 - RNA, 21 nt, Artificial Sequence
  Description of Artificial Sequence: Synthetic oligonucleotide
gcuugggugaugggggcugaa

SEQ ID NO: 4071 - RNA, 21 nt, Artificial Sequence
  Description of Artificial Sequence: Synthetic oligonucleotide
agcccccaucacccaagccac

SEQ ID NO: 4072 - RNA, 21 nt, Artificial Sequence
  Description of Artificial Sequence: Synthetic oligonucleotide
ggcuugggugaugggggcuga

SEQ ID NO: 4073 - RNA, 21 nt, Artificial Sequence
  Description of Artificial Sequence: Synthetic oligonucleotide
gcccccaucacccaagccaca

SEQ ID NO: 4074 - RNA, 21 nt, Artificial Sequence
  Description of Artificial Sequence: Synthetic oligonucleotide
uggcuugggugaugggggcug

SEQ ID NO: 4075 - RNA, 21 nt, Artificial Sequence
  Description of Artificial Sequence: Synthetic oligonucleotide
cccccaucacccaagccacaa

SEQ ID NO: 4076 - RNA, 21 nt, Artificial Sequence
  Description of Artificial Sequence: Synthetic oligonucleotide
guggcuugggugaugggggcu

SEQ ID NO: 4077 - RNA, 21 nt, Artificial Sequence
  Description of Artificial Sequence: Synthetic oligonucleotide
ccccaucacccaagccacaag

SEQ ID NO: 4078 - RNA, 21 nt, Artificial Sequence
  Description of Artificial Sequence: Synthetic oligonucleotide
uguggcuugggugaugggggc

SEQ ID NO: 4079 - RNA, 21 nt, Artificial Sequence
  Description of Artificial Sequence: Synthetic oligonucleotide
cccaucacccaagccacaagc

SEQ ID NO: 4080 - RNA, 21 nt, Artificial Sequence
  Description of Artificial Sequence: Synthetic oligonucleotide
uuguggcuugggugauggggg

SEQ ID NO: 4081 - RNA, 21 nt, Artificial Sequence
  Description of Artificial Sequence: Synthetic oligonucleotide
ccaucacccaagccacaagcu

SEQ ID NO: 4082 - RNA, 21 nt, Artificial Sequence
  Description of Artificial Sequence: Synthetic oligonucleotide
cuuguggcuugggugaugggg

SEQ ID NO: 4083 - RNA, 21 nt, Artificial Sequence
  Description of Artificial Sequence: Synthetic oligonucleotide
caucacccaagccacaagcug

SEQ ID NO: 4084 - RNA, 21 nt, Artificial Sequence
  Description of Artificial Sequence: Synthetic oligonucleotide
gcuuguggcuugggugauggg

SEQ ID NO: 4085 - RNA, 21 nt, Artificial Sequence
  Description of Artificial Sequence: Synthetic oligonucleotide
aucacccaagccacaagcuga

SEQ ID NO: 4086 - RNA, 21 nt, Artificial Sequence
  Description of Artificial Sequence: Synthetic oligonucleotide
agcuuguggcuugggugaugg

SEQ ID NO: 4087 - RNA, 21 nt, Artificial Sequence
  Description of Artificial Sequence: Synthetic oligonucleotide
ucacccaagccacaagcugac

SEQ ID NO: 4088 - RNA, 21 nt, Artificial Sequence
  Description of Artificial Sequence: Synthetic oligonucleotide
cagcuuguggcuugggugaug

SEQ ID NO: 4089 - RNA, 21 nt, Artificial Sequence
  Description of Artificial Sequence: Synthetic oligonucleotide
cacccaagccacaagcugacc

SEQ ID NO: 4090 - RNA, 21 nt, Artificial Sequence
  Description of Artificial Sequence: Synthetic oligonucleotide
ucagcuuguggcuugggugau

SEQ ID NO: 4091 - RNA, 21 nt, Artificial Sequence
  Description of Artificial Sequence: Synthetic oligonucleotide
acccaagccacaagcugaccc

SEQ ID NO: 4092 - RNA, 21 nt, Artificial Sequence
  Description of Artificial Sequence: Synthetic oligonucleotide
gucagcuuguggcuuggguga

SEQ ID NO: 4093 - RNA, 21 nt, Artificial Sequence
  Description of Artificial Sequence: Synthetic oligonucleotide
cccaagccacaagcugacccc

SEQ ID NO: 4094 - RNA, 21 nt, Artificial Sequence
  Description of Artificial Sequence: Synthetic oligonucleotide
ggucagcuuguggcuugggug

SEQ ID NO: 4095 - RNA, 21 nt, Artificial Sequence
  Description of Artificial Sequence: Synthetic oligonucleotide
ccaagccacaagcugaccccu

SEQ ID NO: 4096 - RNA, 21 nt, Artificial Sequence
  Description of Artificial Sequence: Synthetic oligonucleotide
gggucagcuuguggcuugggu

SEQ ID NO: 4097 - RNA, 21 nt, Artificial Sequence
  Description of Artificial Sequence: Synthetic oligonucleotide
caagccacaagcugaccccuu

SEQ ID NO: 4098 - RNA, 21 nt, Artificial Sequence
  Description of Artificial Sequence: Synthetic oligonucleotide
ggggucagcuuguggcuuggg

SEQ ID NO: 4099 - RNA, 21 nt, Artificial Sequence
  Description of Artificial Sequence: Synthetic oligonucleotide
aagccacaagcugaccccuuc

SEQ ID NO: 4100 - RNA, 21 nt, Artificial Sequence
  Description of Artificial Sequence: Synthetic oligonucleotide
aggggucagcuuguggcuugg

SEQ ID NO: 4101 - RNA, 21 nt, Artificial Sequence
  Description of Artificial Sequence: Synthetic oligonucleotide
agccacaagcugaccccuucg

SEQ ID NO: 4102 - RNA, 21 nt, Artificial Sequence
  Description of Artificial Sequence: Synthetic oligonucleotide
aaggggucagcuuguggcuug

SEQ ID NO: 4103 - RNA, 21 nt, Artificial Sequence
  Description of Artificial Sequence: Synthetic oligonucleotide
gccacaagcugaccccuucgu

SEQ ID NO: 4104 - RNA, 21 nt, Artificial Sequence
  Description of Artificial Sequence: Synthetic oligonucleotide
gaaggggucagcuuguggcuu

SEQ ID NO: 4105 - RNA, 21 nt, Artificial Sequence
  Description of Artificial Sequence: Synthetic oligonucleotide
ccacaagcugaccccuucgug

SEQ ID NO: 4106 - RNA, 21 nt, Artificial Sequence
  Description of Artificial Sequence: Synthetic oligonucleotide
cgaaggggucagcuuguggcu

SEQ ID NO: 4107 - RNA, 21 nt, Artificial Sequence
  Description of Artificial Sequence: Synthetic oligonucleotide
cacaagcugaccccuucgugg

SEQ ID NO: 4108 - RNA, 21 nt, Artificial Sequence
  Description of Artificial Sequence: Synthetic oligonucleotide
acgaaggggucagcuuguggc

SEQ ID NO: 4109 - RNA, 21 nt, Artificial Sequence
  Description of Artificial Sequence: Synthetic oligonucleotide
acaagcugaccccuucguggu

SEQ ID NO: 4110 - RNA, 21 nt, Artificial Sequence
  Description of Artificial Sequence: Synthetic oligonucleotide
cacgaaggggucagcuugugg

SEQ ID NO: 4111 - RNA, 21 nt, Artificial Sequence
  Description of Artificial Sequence: Synthetic oligonucleotide
caagcugaccccuucgugguu

SEQ ID NO: 4112 - RNA, 21 nt, Artificial Sequence
  Description of Artificial Sequence: Synthetic oligonucleotide
ccacgaaggggucagcuugug

SEQ ID NO: 4113 - RNA, 21 nt, Artificial Sequence
  Description of Artificial Sequence: Synthetic oligonucleotide
aagcugaccccuucgugguua

SEQ ID NO: 4114 - RNA, 21 nt, Artificial Sequence
  Description of Artificial Sequence: Synthetic oligonucleotide
accacgaaggggucagcuugu

SEQ ID NO: 4115 - RNA, 21 nt, Artificial Sequence
  Description of Artificial Sequence: Synthetic oligonucleotide
agcugaccccuucgugguuau

SEQ ID NO: 4116 - RNA, 21 nt, Artificial Sequence
  Description of Artificial Sequence: Synthetic oligonucleotide
aaccacgaaggggucagcuug

SEQ ID NO: 4117 - RNA, 21 nt, Artificial Sequence
  Description of Artificial Sequence: Synthetic oligonucleotide
gcugaccccuucgugguuaua

SEQ ID NO: 4118 - RNA, 21 nt, Artificial Sequence
  Description of Artificial Sequence: Synthetic oligonucleotide
uaaccacgaaggggucagcuu

SEQ ID NO: 4119 - RNA, 21 nt, Artificial Sequence
  Description of Artificial Sequence: Synthetic oligonucleotide
cugaccccuucgugguuauag

SEQ ID NO: 4120 - RNA, 21 nt, Artificial Sequence
  Description of Artificial Sequence: Synthetic oligonucleotide
auaaccacgaaggggucagcu

SEQ ID NO: 4121 - RNA, 21 nt, Artificial Sequence
  Description of Artificial Sequence: Synthetic oligonucleotide
ugaccccuucgugguuauagc

SEQ ID NO: 4122 - RNA, 21 nt, Artificial Sequence
  Description of Artificial Sequence: Synthetic oligonucleotide
uauaaccacgaaggggucagc

SEQ ID NO: 4123 - RNA, 21 nt, Artificial Sequence
  Description of Artificial Sequence: Synthetic oligonucleotide
gaccccuucgugguuauagcc

SEQ ID NO: 4124 - RNA, 21 nt, Artificial Sequence
  Description of Artificial Sequence: Synthetic oligonucleotide
cuauaaccacgaaggggucag

SEQ ID NO: 4125 - RNA, 21 nt, Artificial Sequence
  Description of Artificial Sequence: Synthetic oligonucleotide
accccuucgugguuauagccc

SEQ ID NO: 4126 - RNA, 21 nt, Artificial Sequence
  Description of Artificial Sequence: Synthetic oligonucleotide
gcuauaaccacgaagggguca

SEQ ID NO: 4127 - RNA, 21 nt, Artificial Sequence
  Description of Artificial Sequence: Synthetic oligonucleotide
ccccuucgugguuauagcccu

SEQ ID NO: 4128 - RNA, 21 nt, Artificial Sequence
  Description of Artificial Sequence: Synthetic oligonucleotide
ggcuauaaccacgaagggguc

SEQ ID NO: 4129 - RNA, 21 nt, Artificial Sequence
  Description of Artificial Sequence: Synthetic oligonucleotide
cccuucgugguuauagcccug

SEQ ID NO: 4130 - RNA, 21 nt, Artificial Sequence
  Description of Artificial Sequence: Synthetic oligonucleotide
gggcuauaaccacgaaggggu

SEQ ID NO: 4131 - RNA, 21 nt, Artificial Sequence
  Description of Artificial Sequence: Synthetic oligonucleotide
ccuucgugguuauagcccugc

SEQ ID NO: 4132 - RNA, 21 nt, Artificial Sequence
  Description of Artificial Sequence: Synthetic oligonucleotide
agggcuauaaccacgaagggg

SEQ ID NO: 4133 - RNA, 21 nt, Artificial Sequence
  Description of Artificial Sequence: Synthetic oligonucleotide
cuucgugguuauagcccugcc

SEQ ID NO: 4134 - RNA, 21 nt, Artificial Sequence
  Description of Artificial Sequence: Synthetic oligonucleotide
cagggcuauaaccacgaaggg

SEQ ID NO: 4135 - RNA, 21 nt, Artificial Sequence
  Description of Artificial Sequence: Synthetic oligonucleotide
uucgugguuauagcccugccc

SEQ ID NO: 4136 - RNA, 21 nt, Artificial Sequence
  Description of Artificial Sequence: Synthetic oligonucleotide
gcagggcuauaaccacgaagg

SEQ ID NO: 4137 - RNA, 21 nt, Artificial Sequence
  Description of Artificial Sequence: Synthetic oligonucleotide
ucgugguuauagcccugcccu

SEQ ID NO: 4138 - RNA, 21 nt, Artificial Sequence
  Description of Artificial Sequence: Synthetic oligonucleotide
ggcagggcuauaaccacgaag

SEQ ID NO: 4139 - RNA, 21 nt, Artificial Sequence
  Description of Artificial Sequence: Synthetic oligonucleotide
cgugguuauagcccugcccuc

SEQ ID NO: 4140 - RNA, 21 nt, Artificial Sequence
  Description of Artificial Sequence: Synthetic oligonucleotide
gggcagggcuauaaccacgaa

SEQ ID NO: 4141 - RNA, 21 nt, Artificial Sequence
  Description of Artificial Sequence: Synthetic oligonucleotide
gugguuauagcccugcccucc

SEQ ID NO: 4142 - RNA, 21 nt, Artificial Sequence
  Description of Artificial Sequence: Synthetic oligonucleotide
agggcagggcuauaaccacga

SEQ ID NO: 4143 - RNA, 21 nt, Artificial Sequence
  Description of Artificial Sequence: Synthetic oligonucleotide
ugguuauagcccugcccuccc

SEQ ID NO: 4144 - RNA, 21 nt, Artificial Sequence
  Description of Artificial Sequence: Synthetic oligonucleotide
gagggcagggcuauaaccacg

SEQ ID NO: 4145 - RNA, 21 nt, Artificial Sequence
  Description of Artificial Sequence: Synthetic oligonucleotide
gguuauagcccugcccuccca

SEQ ID NO: 4146 - RNA, 21 nt, Artificial Sequence
  Description of Artificial Sequence: Synthetic oligonucleotide
ggagggcagggcuauaaccac

SEQ ID NO: 4147 - RNA, 21 nt, Artificial Sequence
  Description of Artificial Sequence: Synthetic oligonucleotide
guuauagcccugcccucccaa

SEQ ID NO: 4148 - RNA, 21 nt, Artificial Sequence
  Description of Artificial Sequence: Synthetic oligonucleotide
gggagggcagggcuauaacca

SEQ ID NO: 4149 - RNA, 21 nt, Artificial Sequence
  Description of Artificial Sequence: Synthetic oligonucleotide
uuauagcccugcccucccaag

SEQ ID NO: 4150 - RNA, 21 nt, Artificial Sequence
  Description of Artificial Sequence: Synthetic oligonucleotide
ugggagggcagggcuauaacc

SEQ ID NO: 4151 - RNA, 21 nt, Artificial Sequence
  Description of Artificial Sequence: Synthetic oligonucleotide
uauagcccugcccucccaagu

SEQ ID NO: 4152 - RNA, 21 nt, Artificial Sequence
  Description of Artificial Sequence: Synthetic oligonucleotide
uugggagggcagggcuauaac

SEQ ID NO: 4153 - RNA, 21 nt, Artificial Sequence
  Description of Artificial Sequence: Synthetic oligonucleotide
auagcccugcccucccaaguc

SEQ ID NO: 4154 - RNA, 21 nt, Artificial Sequence
  Description of Artificial Sequence: Synthetic oligonucleotide
cuugggagggcagggcuauaa

SEQ ID NO: 4155 - RNA, 21 nt, Artificial Sequence
  Description of Artificial Sequence: Synthetic oligonucleotide
uagcccugcccucccaagucc

SEQ ID NO: 4156 - RNA, 21 nt, Artificial Sequence
  Description of Artificial Sequence: Synthetic oligonucleotide
acuugggagggcagggcuaua

SEQ ID NO: 4157 - RNA, 21 nt, Artificial Sequence
  Description of Artificial Sequence: Synthetic oligonucleotide
agcccugcccucccaaguccc

SEQ ID NO: 4158 - RNA, 21 nt, Artificial Sequence
  Description of Artificial Sequence: Synthetic oligonucleotide
gacuugggagggcagggcuau

SEQ ID NO: 4159 - RNA, 21 nt, Artificial Sequence
  Description of Artificial Sequence: Synthetic oligonucleotide
gcccugcccucccaaguccca

SEQ ID NO: 4160 - RNA, 21 nt, Artificial Sequence
  Description of Artificial Sequence: Synthetic oligonucleotide
ggacuugggagggcagggcua

SEQ ID NO: 4161 - RNA, 21 nt, Artificial Sequence
  Description of Artificial Sequence: Synthetic oligonucleotide
cccugcccucccaagucccac

SEQ ID NO: 4162 - RNA, 21 nt, Artificial Sequence
  Description of Artificial Sequence: Synthetic oligonucleotide
gggacuugggagggcagggcu

SEQ ID NO: 4163 - RNA, 21 nt, Artificial Sequence
  Description of Artificial Sequence: Synthetic oligonucleotide
ccugcccucccaagucccacc

SEQ ID NO: 4164 - RNA, 21 nt, Artificial Sequence
  Description of Artificial Sequence: Synthetic oligonucleotide
ugggacuugggagggcagggc

SEQ ID NO: 4165 - RNA, 21 nt, Artificial Sequence
  Description of Artificial Sequence: Synthetic oligonucleotide
cugcccucccaagucccaccc

SEQ ID NO: 4166 - RNA, 21 nt, Artificial Sequence
  Description of Artificial Sequence: Synthetic oligonucleotide
gugggacuugggagggcaggg

SEQ ID NO: 4167 - RNA, 21 nt, Artificial Sequence
  Description of Artificial Sequence: Synthetic oligonucleotide
ugcccucccaagucccacccu

SEQ ID NO: 4168 - RNA, 21 nt, Artificial Sequence
  Description of Artificial Sequence: Synthetic oligonucleotide
ggugggacuugggagggcagg

SEQ ID NO: 4169 - RNA, 21 nt, Artificial Sequence
  Description of Artificial Sequence: Synthetic oligonucleotide
gcccucccaagucccacccuc

SEQ ID NO: 4170 - RNA, 21 nt, Artificial Sequence
  Description of Artificial Sequence: Synthetic oligonucleotide
gggugggacuugggagggcag

SEQ ID NO: 4171 - RNA, 21 nt, Artificial Sequence
  Description of Artificial Sequence: Synthetic oligonucleotide
cccucccaagucccacccucu

SEQ ID NO: 4172 - RNA, 21 nt, Artificial Sequence
  Description of Artificial Sequence: Synthetic oligonucleotide
agggugggacuugggagggca

SEQ ID NO: 4173 - RNA, 21 nt, Artificial Sequence
  Description of Artificial Sequence: Synthetic oligonucleotide
ccucccaagucccacccucuu

SEQ ID NO: 4174 - RNA, 21 nt, Artificial Sequence
  Description of Artificial Sequence: Synthetic oligonucleotide
gagggugggacuugggagggc

SEQ ID NO: 4175 - RNA, 21 nt, Artificial Sequence
  Description of Artificial Sequence: Synthetic oligonucleotide
cucccaagucccacccucuuc

SEQ ID NO: 4176 - RNA, 21 nt, Artificial Sequence
  Description of Artificial Sequence: Synthetic oligonucleotide
agagggugggacuugggaggg

SEQ ID NO: 4177 - RNA, 21 nt, Artificial Sequence
  Description of Artificial Sequence: Synthetic oligonucleotide
ucccaagucccacccucuucc

SEQ ID NO: 4178 - RNA, 21 nt, Artificial Sequence
  Description of Artificial Sequence: Synthetic oligonucleotide
aagagggugggacuugggagg

SEQ ID NO: 4179 - RNA, 21 nt, Artificial Sequence
  Description of Artificial Sequence: Synthetic oligonucleotide
cccaagucccacccucuuccc

SEQ ID NO: 4180 - RNA, 21 nt, Artificial Sequence
  Description of Artificial Sequence: Synthetic oligonucleotide
gaagagggugggacuugggag

SEQ ID NO: 4181 - RNA, 21 nt, Artificial Sequence
  Description of Artificial Sequence: Synthetic oligonucleotide
ccaagucccacccucuuccca

SEQ ID NO: 4182 - RNA, 21 nt, Artificial Sequence
  Description of Artificial Sequence: Synthetic oligonucleotide
ggaagagggugggacuuggga

SEQ ID NO: 4183 - RNA, 21 nt, Artificial Sequence
  Description of Artificial Sequence: Synthetic oligonucleotide
caagucccacccucuucccau

SEQ ID NO: 4184 - RNA, 21 nt, Artificial Sequence
  Description of Artificial Sequence: Synthetic oligonucleotide
gggaagagggugggacuuggg

SEQ ID NO: 4185 - RNA, 21 nt, Artificial Sequence
  Description of Artificial Sequence: Synthetic oligonucleotide
aagucccacccucuucccaug

SEQ ID NO: 4186 - RNA, 21 nt, Artificial Sequence
  Description of Artificial Sequence: Synthetic oligonucleotide
ugggaagagggugggacuugg

SEQ ID NO: 4187 - RNA, 21 nt, Artificial Sequence
  Description of Artificial Sequence: Synthetic oligonucleotide
agucccacccucuucccaugu

SEQ ID NO: 4188 - RNA, 21 nt, Artificial Sequence
  Description of Artificial Sequence: Synthetic oligonucleotide
augggaagagggugggacuug

SEQ ID NO: 4189 - RNA, 21 nt, Artificial Sequence
  Description of Artificial Sequence: Synthetic oligonucleotide
gucccacccucuucccauguc

SEQ ID NO: 4190 - RNA, 21 nt, Artificial Sequence
  Description of Artificial Sequence: Synthetic oligonucleotide
caugggaagagggugggacuu

SEQ ID NO: 4191 - RNA, 21 nt, Artificial Sequence
  Description of Artificial Sequence: Synthetic oligonucleotide
ucccacccucuucccaugucc

SEQ ID NO: 4192 - RNA, 21 nt, Artificial Sequence
  Description of Artificial Sequence: Synthetic oligonucleotide
acaugggaagagggugggacu

SEQ ID NO: 4193 - RNA, 21 nt, Artificial Sequence
  Description of Artificial Sequence: Synthetic oligonucleotide
cccacccucuucccauguccc

SEQ ID NO: 4194 - RNA, 21 nt, Artificial Sequence
  Description of Artificial Sequence: Synthetic oligonucleotide
gacaugggaagagggugggac

SEQ ID NO: 4195 - RNA, 21 nt, Artificial Sequence
  Description of Artificial Sequence: Synthetic oligonucleotide
ccacccucuucccauguccca

SEQ ID NO: 4196 - RNA, 21 nt, Artificial Sequence
  Description of Artificial Sequence: Synthetic oligonucleotide
ggacaugggaagaggguggga

SEQ ID NO: 4197 - RNA, 21 nt, Artificial Sequence
  Description of Artificial Sequence: Synthetic oligonucleotide
cacccucuucccaugucccac

SEQ ID NO: 4198 - RNA, 21 nt, Artificial Sequence
  Description of Artificial Sequence: Synthetic oligonucleotide
gggacaugggaagaggguggg

SEQ ID NO: 4199 - RNA, 21 nt, Artificial Sequence
  Description of Artificial Sequence: Synthetic oligonucleotide
acccucuucccaugucccacc

SEQ ID NO: 4200 - RNA, 21 nt, Artificial Sequence
  Description of Artificial Sequence: Synthetic oligonucleotide
ugggacaugggaagagggugg

SEQ ID NO: 4201 - RNA, 21 nt, Artificial Sequence
  Description of Artificial Sequence: Synthetic oligonucleotide
cccucuucccaugucccaccc

SEQ ID NO: 4202 - RNA, 21 nt, Artificial Sequence
  Description of Artificial Sequence: Synthetic oligonucleotide
gugggacaugggaagagggug

SEQ ID NO: 4203 - RNA, 21 nt, Artificial Sequence
  Description of Artificial Sequence: Synthetic oligonucleotide
ccucuucccaugucccacccu

SEQ ID NO: 4204 - RNA, 21 nt, Artificial Sequence
  Description of Artificial Sequence: Synthetic oligonucleotide
ggugggacaugggaagagggu

SEQ ID NO: 4205 - RNA, 21 nt, Artificial Sequence
  Description of Artificial Sequence: Synthetic oligonucleotide
cucuucccaugucccacccuc

SEQ ID NO: 4206 - RNA, 21 nt, Artificial Sequence
  Description of Artificial Sequence: Synthetic oligonucleotide
gggugggacaugggaagaggg

SEQ ID NO: 4207 - RNA, 21 nt, Artificial Sequence
  Description of Artificial Sequence: Synthetic oligonucleotide
ucuucccaugucccacccucc

SEQ ID NO: 4208 - RNA, 21 nt, Artificial Sequence
  Description of Artificial Sequence: Synthetic oligonucleotide
agggugggacaugggaagagg

SEQ ID NO: 4209 - RNA, 21 nt, Artificial Sequence
  Description of Artificial Sequence: Synthetic oligonucleotide
cuucccaugucccacccuccc

SEQ ID NO: 4210 - RNA, 21 nt, Artificial Sequence
  Description of Artificial Sequence: Synthetic oligonucleotide
gagggugggacaugggaagag

SEQ ID NO: 4211 - RNA, 21 nt, Artificial Sequence
  Description of Artificial Sequence: Synthetic oligonucleotide
uucccaugucccacccucccu

SEQ ID NO: 4212 - RNA, 21 nt, Artificial Sequence
  Description of Artificial Sequence: Synthetic oligonucleotide
ggagggugggacaugggaaga

SEQ ID NO: 4213 - RNA, 21 nt, Artificial Sequence
  Description of Artificial Sequence: Synthetic oligonucleotide
ucccaugucccacccucccua

SEQ ID NO: 4214 - RNA, 21 nt, Artificial Sequence
  Description of Artificial Sequence: Synthetic oligonucleotide
gggagggugggacaugggaag

SEQ ID NO: 4215 - RNA, 21 nt, Artificial Sequence
  Description of Artificial Sequence: Synthetic oligonucleotide
cccaugucccacccucccuag

SEQ ID NO: 4216 - RNA, 21 nt, Artificial Sequence
  Description of Artificial Sequence: Synthetic oligonucleotide
agggagggugggacaugggaa

SEQ ID NO: 4217 - RNA, 21 nt, Artificial Sequence
  Description of Artificial Sequence: Synthetic oligonucleotide
ccaugucccacccucccuaga

SEQ ID NO: 4218 - RNA, 21 nt, Artificial Sequence
  Description of Artificial Sequence: Synthetic oligonucleotide
uagggagggugggacauggga

SEQ ID NO: 4219 - RNA, 21 nt, Artificial Sequence
  Description of Artificial Sequence: Synthetic oligonucleotide
caugucccacccucccuagag

SEQ ID NO: 4220 - RNA, 21 nt, Artificial Sequence
  Description of Artificial Sequence: Synthetic oligonucleotide
cuagggagggugggacauggg

SEQ ID NO: 4221 - RNA, 21 nt, Artificial Sequence
  Description of Artificial Sequence: Synthetic oligonucleotide
augucccacccucccuagagg

SEQ ID NO: 4222 - RNA, 21 nt, Artificial Sequence
  Description of Artificial Sequence: Synthetic oligonucleotide
ucuagggagggugggacaugg

SEQ ID NO: 4223 - RNA, 21 nt, Artificial Sequence
  Description of Artificial Sequence: Synthetic oligonucleotide
ugucccacccucccuagaggg

SEQ ID NO: 4224 - RNA, 21 nt, Artificial Sequence
  Description of Artificial Sequence: Synthetic oligonucleotide
cucuagggagggugggacaug

SEQ ID NO: 4225 - RNA, 21 nt, Artificial Sequence
  Description of Artificial Sequence: Synthetic oligonucleotide
gucccacccucccuagagggg

SEQ ID NO: 4226 - RNA, 21 nt, Artificial Sequence
  Description of Artificial Sequence: Synthetic oligonucleotide
ccucuagggagggugggacau

SEQ ID NO: 4227 - RNA, 21 nt, Artificial Sequence
  Description of Artificial Sequence: Synthetic oligonucleotide
ucccacccucccuagaggggc

SEQ ID NO: 4228 - RNA, 21 nt, Artificial Sequence
  Description of Artificial Sequence: Synthetic oligonucleotide
cccucuagggagggugggaca

SEQ ID NO: 4229 - RNA, 21 nt, Artificial Sequence
  Description of Artificial Sequence: Synthetic oligonucleotide
cccacccucccuagaggggca

SEQ ID NO: 4230 - RNA, 21 nt, Artificial Sequence
  Description of Artificial Sequence: Synthetic oligonucleotide
ccccucuagggagggugggac

SEQ ID NO: 4231 - RNA, 21 nt, Artificial Sequence
  Description of Artificial Sequence: Synthetic oligonucleotide
ccacccucccuagaggggcac

SEQ ID NO: 4232 - RNA, 21 nt, Artificial Sequence
  Description of Artificial Sequence: Synthetic oligonucleotide
gccccucuagggaggguggga

SEQ ID NO: 4233 - RNA, 21 nt, Artificial Sequence
  Description of Artificial Sequence: Synthetic oligonucleotide
cacccucccuagaggggcacc

SEQ ID NO: 4234 - RNA, 21 nt, Artificial Sequence
  Description of Artificial Sequence: Synthetic oligonucleotide
ugccccucuagggaggguggg

SEQ ID NO: 4235 - RNA, 21 nt, Artificial Sequence
  Description of Artificial Sequence: Synthetic oligonucleotide
acccucccuagaggggcaccu

SEQ ID NO: 4236 - RNA, 21 nt, Artificial Sequence
  Description of Artificial Sequence: Synthetic oligonucleotide
gugccccucuagggagggugg

SEQ ID NO: 4237 - RNA, 21 nt, Artificial Sequence
  Description of Artificial Sequence: Synthetic oligonucleotide
cccucccuagaggggcaccuu

SEQ ID NO: 4238 - RNA, 21 nt, Artificial Sequence
  Description of Artificial Sequence: Synthetic oligonucleotide
ggugccccucuagggagggug

SEQ ID NO: 4239 - RNA, 21 nt, Artificial Sequence
  Description of Artificial Sequence: Synthetic oligonucleotide
ccucccuagaggggcaccuuu

SEQ ID NO: 4240 - RNA, 21 nt, Artificial Sequence
  Description of Artificial Sequence: Synthetic oligonucleotide
aggugccccucuagggagggu

SEQ ID NO: 4241 - RNA, 21 nt, Artificial Sequence
  Description of Artificial Sequence: Synthetic oligonucleotide
cucccuagaggggcaccuuuu

SEQ ID NO: 4242 - RNA, 21 nt, Artificial Sequence
  Description of Artificial Sequence: Synthetic oligonucleotide
aaggugccccucuagggaggg

SEQ ID NO: 4243 - RNA, 21 nt, Artificial Sequence
  Description of Artificial Sequence: Synthetic oligonucleotide
ucccuagaggggcaccuuuuc

SEQ ID NO: 4244 - RNA, 21 nt, Artificial Sequence
  Description of Artificial Sequence: Synthetic oligonucleotide
aaaggugccccucuagggagg

SEQ ID NO: 4245 - RNA, 21 nt, Artificial Sequence
  Description of Artificial Sequence: Synthetic oligonucleotide
cccuagaggggcaccuuuuca

SEQ ID NO: 4246 - RNA, 21 nt, Artificial Sequence
  Description of Artificial Sequence: Synthetic oligonucleotide
aaaaggugccccucuagggag

SEQ ID NO: 4247 - RNA, 21 nt, Artificial Sequence
  Description of Artificial Sequence: Synthetic oligonucleotide
ccuagaggggcaccuuuucau

SEQ ID NO: 4248 - RNA, 21 nt, Artificial Sequence
  Description of Artificial Sequence: Synthetic oligonucleotide
gaaaaggugccccucuaggga

SEQ ID NO: 4249 - RNA, 21 nt, Artificial Sequence
  Description of Artificial Sequence: Synthetic oligonucleotide
cuagaggggcaccuuuucaug

SEQ ID NO: 4250 - RNA, 21 nt, Artificial Sequence
  Description of Artificial Sequence: Synthetic oligonucleotide
ugaaaaggugccccucuaggg

SEQ ID NO: 4251 - RNA, 21 nt, Artificial Sequence
  Description of Artificial Sequence: Synthetic oligonucleotide
uagaggggcaccuuuucaugg

SEQ ID NO: 4252 - RNA, 21 nt, Artificial Sequence
  Description of Artificial Sequence: Synthetic oligonucleotide
augaaaaggugccccucuagg

SEQ ID NO: 4253 - RNA, 21 nt, Artificial Sequence
  Description of Artificial Sequence: Synthetic oligonucleotide
agaggggcaccuuuucauggu

SEQ ID NO: 4254 - RNA, 21 nt, Artificial Sequence
  Description of Artificial Sequence: Synthetic oligonucleotide
caugaaaaggugccccucuag

SEQ ID NO: 4255 - RNA, 21 nt, Artificial Sequence
  Description of Artificial Sequence: Synthetic oligonucleotide
gaggggcaccuuuucaugguc

SEQ ID NO: 4256 - RNA, 21 nt, Artificial Sequence
  Description of Artificial Sequence: Synthetic oligonucleotide
ccaugaaaaggugccccucua

SEQ ID NO: 4257 - RNA, 21 nt, Artificial Sequence
  Description of Artificial Sequence: Synthetic oligonucleotide
aggggcaccuuuucauggucu

SEQ ID NO: 4258 - RNA, 21 nt, Artificial Sequence
  Description of Artificial Sequence: Synthetic oligonucleotide
accaugaaaaggugccccucu

SEQ ID NO: 4259 - RNA, 21 nt, Artificial Sequence
  Description of Artificial Sequence: Synthetic oligonucleotide
ggggcaccuuuucauggucuc

SEQ ID NO: 4260 - RNA, 21 nt, Artificial Sequence
  Description of Artificial Sequence: Synthetic oligonucleotide
gaccaugaaaaggugccccuc

SEQ ID NO: 4261 - RNA, 21 nt, Artificial Sequence
  Description of Artificial Sequence: Synthetic oligonucleotide
gggcaccuuuucauggucucu

SEQ ID NO: 4262 - RNA, 21 nt, Artificial Sequence
  Description of Artificial Sequence: Synthetic oligonucleotide
agaccaugaaaaggugccccu

SEQ ID NO: 4263 - RNA, 21 nt, Artificial Sequence
  Description of Artificial Sequence: Synthetic oligonucleotide
ggcaccuuuucauggucucug

SEQ ID NO: 4264 - RNA, 21 nt, Artificial Sequence
  Description of Artificial Sequence: Synthetic oligonucleotide
gagaccaugaaaaggugcccc

SEQ ID NO: 4265 - RNA, 21 nt, Artificial Sequence
  Description of Artificial Sequence: Synthetic oligonucleotide
gcaccuuuucauggucucugc

SEQ ID NO: 4266 - RNA, 21 nt, Artificial Sequence
  Description of Artificial Sequence: Synthetic oligonucleotide
agagaccaugaaaaggugccc

SEQ ID NO: 4267 - RNA, 21 nt, Artificial Sequence
  Description of Artificial Sequence: Synthetic oligonucleotide
caccuuuucauggucucugca

SEQ ID NO: 4268 - RNA, 21 nt, Artificial Sequence
  Description of Artificial Sequence: Synthetic oligonucleotide
cagagaccaugaaaaggugcc

SEQ ID NO: 4269 - RNA, 21 nt, Artificial Sequence
  Description of Artificial Sequence: Synthetic oligonucleotide
accuuuucauggucucugcac

SEQ ID NO: 4270 - RNA, 21 nt, Artificial Sequence
  Description of Artificial Sequence: Synthetic oligonucleotide
gcagagaccaugaaaaggugc

SEQ ID NO: 4271 - RNA, 21 nt, Artificial Sequence
  Description of Artificial Sequence: Synthetic oligonucleotide
ccuuuucauggucucugcacc

SEQ ID NO: 4272 - RNA, 21 nt, Artificial Sequence
  Description of Artificial Sequence: Synthetic oligonucleotide
ugcagagaccaugaaaaggug

SEQ ID NO: 4273 - RNA, 21 nt, Artificial Sequence
  Description of Artificial Sequence: Synthetic oligonucleotide
cuuuucauggucucugcaccc

SEQ ID NO: 4274 - RNA, 21 nt, Artificial Sequence
  Description of Artificial Sequence: Synthetic oligonucleotide
gugcagagaccaugaaaaggu

SEQ ID NO: 4275 - RNA, 21 nt, Artificial Sequence
  Description of Artificial Sequence: Synthetic oligonucleotide
uuuucauggucucugcaccca

SEQ ID NO: 4276 - RNA, 21 nt, Artificial Sequence
  Description of Artificial Sequence: Synthetic oligonucleotide
ggugcagagaccaugaaaagg

SEQ ID NO: 4277 - RNA, 21 nt, Artificial Sequence
  Description of Artificial Sequence: Synthetic oligonucleotide
uuucauggucucugcacccag

SEQ ID NO: 4278 - RNA, 21 nt, Artificial Sequence
  Description of Artificial Sequence: Synthetic oligonucleotide
gggugcagagaccaugaaaag

SEQ ID NO: 4279 - RNA, 21 nt, Artificial Sequence
  Description of Artificial Sequence: Synthetic oligonucleotide
uucauggucucugcacccagu

SEQ ID NO: 4280 - RNA, 21 nt, Artificial Sequence
  Description of Artificial Sequence: Synthetic oligonucleotide
ugggugcagagaccaugaaaa

SEQ ID NO: 4281 - RNA, 21 nt, Artificial Sequence
  Description of Artificial Sequence: Synthetic oligonucleotide
ucauggucucugcacccagug

SEQ ID NO: 4282 - RNA, 21 nt, Artificial Sequence
  Description of Artificial Sequence: Synthetic oligonucleotide
cugggugcagagaccaugaaa

SEQ ID NO: 4283 - RNA, 21 nt, Artificial Sequence
  Description of Artificial Sequence: Synthetic oligonucleotide
cauggucucugcacccaguga

SEQ ID NO: 4284 - RNA, 21 nt, Artificial Sequence
  Description of Artificial Sequence: Synthetic oligonucleotide
acugggugcagagaccaugaa

SEQ ID NO: 4285 - RNA, 21 nt, Artificial Sequence
  Description of Artificial Sequence: Synthetic oligonucleotide
auggucucugcacccagugaa

SEQ ID NO: 4286 - RNA, 21 nt, Artificial Sequence
  Description of Artificial Sequence: Synthetic oligonucleotide
cacugggugcagagaccauga

SEQ ID NO: 4287 - RNA, 21 nt, Artificial Sequence
  Description of Artificial Sequence: Synthetic oligonucleotide
uggucucugcacccagugaac

SEQ ID NO: 4288 - RNA, 21 nt, Artificial Sequence
  Description of Artificial Sequence: Synthetic oligonucleotide
ucacugggugcagagaccaug

SEQ ID NO: 4289 - RNA, 21 nt, Artificial Sequence
  Description of Artificial Sequence: Synthetic oligonucleotide
ggucucugcacccagugaaca

SEQ ID NO: 4290 - RNA, 21 nt, Artificial Sequence
  Description of Artificial Sequence: Synthetic oligonucleotide
uucacugggugcagagaccau

SEQ ID NO: 4291 - RNA, 21 nt, Artificial Sequence
  Description of Artificial Sequence: Synthetic oligonucleotide
gucucugcacccagugaacac

SEQ ID NO: 4292 - RNA, 21 nt, Artificial Sequence
  Description of Artificial Sequence: Synthetic oligonucleotide
guucacugggugcagagacca

SEQ ID NO: 4293 - RNA, 21 nt, Artificial Sequence
  Description of Artificial Sequence: Synthetic oligonucleotide
ucucugcacccagugaacaca

SEQ ID NO: 4294 - RNA, 21 nt, Artificial Sequence
  Description of Artificial Sequence: Synthetic oligonucleotide
uguucacugggugcagagacc

SEQ ID NO: 4295 - RNA, 21 nt, Artificial Sequence
  Description of Artificial Sequence: Synthetic oligonucleotide
cucugcacccagugaacacau

SEQ ID NO: 4296 - RNA, 21 nt, Artificial Sequence
  Description of Artificial Sequence: Synthetic oligonucleotide
guguucacugggugcagagac

SEQ ID NO: 4297 - RNA, 21 nt, Artificial Sequence
  Description of Artificial Sequence: Synthetic oligonucleotide
ucugcacccagugaacacauu

SEQ ID NO: 4298 - RNA, 21 nt, Artificial Sequence
  Description of Artificial Sequence: Synthetic oligonucleotide
uguguucacugggugcagaga

SEQ ID NO: 4299 - RNA, 21 nt, Artificial Sequence
  Description of Artificial Sequence: Synthetic oligonucleotide
cugcacccagugaacacauuu

SEQ ID NO: 4300 - RNA, 21 nt, Artificial Sequence
  Description of Artificial Sequence: Synthetic oligonucleotide
auguguucacugggugcagag

SEQ ID NO: 4301 - RNA, 21 nt, Artificial Sequence
  Description of Artificial Sequence: Synthetic oligonucleotide
ugcacccagugaacacauuuu

SEQ ID NO: 4302 - RNA, 21 nt, Artificial Sequence
  Description of Artificial Sequence: Synthetic oligonucleotide
aauguguucacugggugcaga

SEQ ID NO: 4303 - RNA, 21 nt, Artificial Sequence
  Description of Artificial Sequence: Synthetic oligonucleotide
gcacccagugaacacauuuua

SEQ ID NO: 4304 - RNA, 21 nt, Artificial Sequence
  Description of Artificial Sequence: Synthetic oligonucleotide
aaauguguucacugggugcag

SEQ ID NO: 4305 - RNA, 21 nt, Artificial Sequence
  Description of Artificial Sequence: Synthetic oligonucleotide
cacccagugaacacauuuuac

SEQ ID NO: 4306 - RNA, 21 nt, Artificial Sequence
  Description of Artificial Sequence: Synthetic oligonucleotide
aaaauguguucacugggugca

SEQ ID NO: 4307 - RNA, 21 nt, Artificial Sequence
  Description of Artificial Sequence: Synthetic oligonucleotide
acccagugaacacauuuuacu

SEQ ID NO: 4308 - RNA, 21 nt, Artificial Sequence
  Description of Artificial Sequence: Synthetic oligonucleotide
uaaaauguguucacugggugc

SEQ ID NO: 4309 - RNA, 21 nt, Artificial Sequence
  Description of Artificial Sequence: Synthetic oligonucleotide
cccagugaacacauuuuacuc

SEQ ID NO: 4310 - RNA, 21 nt, Artificial Sequence
  Description of Artificial Sequence: Synthetic oligonucleotide
guaaaauguguucacugggug

SEQ ID NO: 4311 - RNA, 21 nt, Artificial Sequence
  Description of Artificial Sequence: Synthetic oligonucleotide
ccagugaacacauuuuacucu

SEQ ID NO: 4312 - RNA, 21 nt, Artificial Sequence
  Description of Artificial Sequence: Synthetic oligonucleotide
aguaaaauguguucacugggu

SEQ ID NO: 4313 - RNA, 21 nt, Artificial Sequence
  Description of Artificial Sequence: Synthetic oligonucleotide
cagugaacacauuuuacucua

SEQ ID NO: 4314 - RNA, 21 nt, Artificial Sequence
  Description of Artificial Sequence: Synthetic oligonucleotide
gaguaaaauguguucacuggg

SEQ ID NO: 4315 - RNA, 21 nt, Artificial Sequence
  Description of Artificial Sequence: Synthetic oligonucleotide
agugaacacauuuuacucuag

SEQ ID NO: 4316 - RNA, 21 nt, Artificial Sequence
  Description of Artificial Sequence: Synthetic oligonucleotide
agaguaaaauguguucacugg

SEQ ID NO: 4317 - RNA, 21 nt, Artificial Sequence
  Description of Artificial Sequence: Synthetic oligonucleotide
gugaacacauuuuacucuaga

SEQ ID NO: 4318 - RNA, 21 nt, Artificial Sequence
  Description of Artificial Sequence: Synthetic oligonucleotide
uagaguaaaauguguucacug

SEQ ID NO: 4319 - RNA, 21 nt, Artificial Sequence
  Description of Artificial Sequence: Synthetic oligonucleotide
ugaacacauuuuacucuagag

SEQ ID NO: 4320 - RNA, 21 nt, Artificial Sequence
  Description of Artificial Sequence: Synthetic oligonucleotide
cuagaguaaaauguguucacu

SEQ ID NO: 4321 - RNA, 21 nt, Artificial Sequence
  Description of Artificial Sequence: Synthetic oligonucleotide
gaacacauuuuacucuagagg

SEQ ID NO: 4322 - RNA, 21 nt, Artificial Sequence
  Description of Artificial Sequence: Synthetic oligonucleotide
ucuagaguaaaauguguucac

SEQ ID NO: 4323 - RNA, 21 nt, Artificial Sequence
  Description of Artificial Sequence: Synthetic oligonucleotide
aacacauuuuacucuagaggc

SEQ ID NO: 4324 - RNA, 21 nt, Artificial Sequence
  Description of Artificial Sequence: Synthetic oligonucleotide
cucuagaguaaaauguguuca

SEQ ID NO: 4325 - RNA, 21 nt, Artificial Sequence
  Description of Artificial Sequence: Synthetic oligonucleotide
acacauuuuacucuagaggca

SEQ ID NO: 4326 - RNA, 21 nt, Artificial Sequence
  Description of Artificial Sequence: Synthetic oligonucleotide
ccucuagaguaaaauguguuc

SEQ ID NO: 4327 - RNA, 21 nt, Artificial Sequence
  Description of Artificial Sequence: Synthetic oligonucleotide
cacauuuuacucuagaggcau

SEQ ID NO: 4328 - RNA, 21 nt, Artificial Sequence
  Description of Artificial Sequence: Synthetic oligonucleotide
gccucuagaguaaaauguguu

SEQ ID NO: 4329 - RNA, 21 nt, Artificial Sequence
  Description of Artificial Sequence: Synthetic oligonucleotide
acauuuuacucuagaggcauc

SEQ ID NO: 4330 - RNA, 21 nt, Artificial Sequence
  Description of Artificial Sequence: Synthetic oligonucleotide
ugccucuagaguaaaaugugu

SEQ ID NO: 4331 - RNA, 21 nt, Artificial Sequence
  Description of Artificial Sequence: Synthetic oligonucleotide
cauuuuacucuagaggcauca

SEQ ID NO: 4332 - RNA, 21 nt, Artificial Sequence
  Description of Artificial Sequence: Synthetic oligonucleotide
augccucuagaguaaaaugug

SEQ ID NO: 4333 - RNA, 21 nt, Artificial Sequence
  Description of Artificial Sequence: Synthetic oligonucleotide
auuuuacucuagaggcaucac

SEQ ID NO: 4334 - RNA, 21 nt, Artificial Sequence
  Description of Artificial Sequence: Synthetic oligonucleotide
gaugccucuagaguaaaaugu

SEQ ID NO: 4335 - RNA, 21 nt, Artificial Sequence
  Description of Artificial Sequence: Synthetic oligonucleotide
uuuuacucuagaggcaucacc

SEQ ID NO: 4336 - RNA, 21 nt, Artificial Sequence
  Description of Artificial Sequence: Synthetic oligonucleotide
ugaugccucuagaguaaaaug

SEQ ID NO: 4337 - RNA, 21 nt, Artificial Sequence
  Description of Artificial Sequence: Synthetic oligonucleotide
uuuacucuagaggcaucaccu

SEQ ID NO: 4338 - RNA, 21 nt, Artificial Sequence
  Description of Artificial Sequence: Synthetic oligonucleotide
gugaugccucuagaguaaaau

SEQ ID NO: 4339 - RNA, 21 nt, Artificial Sequence
  Description of Artificial Sequence: Synthetic oligonucleotide
uuacucuagaggcaucaccug

SEQ ID NO: 4340 - RNA, 21 nt, Artificial Sequence
  Description of Artificial Sequence: Synthetic oligonucleotide
ggugaugccucuagaguaaaa

SEQ ID NO: 4341 - RNA, 21 nt, Artificial Sequence
  Description of Artificial Sequence: Synthetic oligonucleotide
uacucuagaggcaucaccugg

SEQ ID NO: 4342 - RNA, 21 nt, Artificial Sequence
  Description of Artificial Sequence: Synthetic oligonucleotide
aggugaugccucuagaguaaa

SEQ ID NO: 4343 - RNA, 21 nt, Artificial Sequence
  Description of Artificial Sequence: Synthetic oligonucleotide
acucuagaggcaucaccuggg

SEQ ID NO: 4344 - RNA, 21 nt, Artificial Sequence
  Description of Artificial Sequence: Synthetic oligonucleotide
caggugaugccucuagaguaa

SEQ ID NO: 4345 - RNA, 21 nt, Artificial Sequence
  Description of Artificial Sequence: Synthetic oligonucleotide
cucuagaggcaucaccuggga

SEQ ID NO: 4346 - RNA, 21 nt, Artificial Sequence
  Description of Artificial Sequence: Synthetic oligonucleotide
ccaggugaugccucuagagua

SEQ ID NO: 4347 - RNA, 21 nt, Artificial Sequence
  Description of Artificial Sequence: Synthetic oligonucleotide
ucuagaggcaucaccugggac

SEQ ID NO: 4348 - RNA, 21 nt, Artificial Sequence
  Description of Artificial Sequence: Synthetic oligonucleotide
cccaggugaugccucuagagu

SEQ ID NO: 4349 - RNA, 21 nt, Artificial Sequence
  Description of Artificial Sequence: Synthetic oligonucleotide
cuagaggcaucaccugggacc

SEQ ID NO: 4350 - RNA, 21 nt, Artificial Sequence
  Description of Artificial Sequence: Synthetic oligonucleotide
ucccaggugaugccucuagag

SEQ ID NO: 4351 - RNA, 21 nt, Artificial Sequence
  Description of Artificial Sequence: Synthetic oligonucleotide
uagaggcaucaccugggaccu

SEQ ID NO: 4352 - RNA, 21 nt, Artificial Sequence
  Description of Artificial Sequence: Synthetic oligonucleotide
gucccaggugaugccucuaga

SEQ ID NO: 4353 - RNA, 21 nt, Artificial Sequence
  Description of Artificial Sequence: Synthetic oligonucleotide
agaggcaucaccugggaccuu

SEQ ID NO: 4354 - RNA, 21 nt, Artificial Sequence
  Description of Artificial Sequence: Synthetic oligonucleotide
ggucccaggugaugccucuag

SEQ ID NO: 4355 - RNA, 21 nt, Artificial Sequence
  Description of Artificial Sequence: Synthetic oligonucleotide
gaggcaucaccugggaccuua

SEQ ID NO: 4356 - RNA, 21 nt, Artificial Sequence
  Description of Artificial Sequence: Synthetic oligonucleotide
aggucccaggugaugccucua

SEQ ID NO: 4357 - RNA, 21 nt, Artificial Sequence
  Description of Artificial Sequence: Synthetic oligonucleotide
aggcaucaccugggaccuuac

SEQ ID NO: 4358 - RNA, 21 nt, Artificial Sequence
  Description of Artificial Sequence: Synthetic oligonucleotide
aaggucccaggugaugccucu

SEQ ID NO: 4359 - RNA, 21 nt, Artificial Sequence
  Description of Artificial Sequence: Synthetic oligonucleotide
ggcaucaccugggaccuuacu

SEQ ID NO: 4360 - RNA, 21 nt, Artificial Sequence
  Description of Artificial Sequence: Synthetic oligonucleotide
uaaggucccaggugaugccuc

SEQ ID NO: 4361 - RNA, 21 nt, Artificial Sequence
  Description of Artificial Sequence: Synthetic oligonucleotide
gcaucaccugggaccuuacuc

SEQ ID NO: 4362 - RNA, 21 nt, Artificial Sequence
  Description of Artificial Sequence: Synthetic oligonucleotide
guaaggucccaggugaugccu

SEQ ID NO: 4363 - RNA, 21 nt, Artificial Sequence
  Description of Artificial Sequence: Synthetic oligonucleotide
caucaccugggaccuuacucc

SEQ ID NO: 4364 - RNA, 21 nt, Artificial Sequence
  Description of Artificial Sequence: Synthetic oligonucleotide
aguaaggucccaggugaugcc

SEQ ID NO: 4365 - RNA, 21 nt, Artificial Sequence
  Description of Artificial Sequence: Synthetic oligonucleotide
aucaccugggaccuuacuccu

SEQ ID NO: 4366 - RNA, 21 nt, Artificial Sequence
  Description of Artificial Sequence: Synthetic oligonucleotide
gaguaaggucccaggugaugc

SEQ ID NO: 4367 - RNA, 21 nt, Artificial Sequence
  Description of Artificial Sequence: Synthetic oligonucleotide
ucaccugggaccuuacuccuc

SEQ ID NO: 4368 - RNA, 21 nt, Artificial Sequence
  Description of Artificial Sequence: Synthetic oligonucleotide
ggaguaaggucccaggugaug

SEQ ID NO: 4369 - RNA, 21 nt, Artificial Sequence
  Description of Artificial Sequence: Synthetic oligonucleotide
caccugggaccuuacuccucu

SEQ ID NO: 4370 - RNA, 21 nt, Artificial Sequence
  Description of Artificial Sequence: Synthetic oligonucleotide
aggaguaaggucccaggugau

SEQ ID NO: 4371 - RNA, 21 nt, Artificial Sequence
  Description of Artificial Sequence: Synthetic oligonucleotide
accugggaccuuacuccucuu

SEQ ID NO: 4372 - RNA, 21 nt, Artificial Sequence
  Description of Artificial Sequence: Synthetic oligonucleotide
gaggaguaaggucccagguga

SEQ ID NO: 4373 - RNA, 21 nt, Artificial Sequence
  Description of Artificial Sequence: Synthetic oligonucleotide
ccugggaccuuacuccucuuu

SEQ ID NO: 4374 - RNA, 21 nt, Artificial Sequence
  Description of Artificial Sequence: Synthetic oligonucleotide
agaggaguaaggucccaggug

SEQ ID NO: 4375 - RNA, 21 nt, Artificial Sequence
  Description of Artificial Sequence: Synthetic oligonucleotide
cugggaccuuacuccucuuuc

SEQ ID NO: 4376 - RNA, 21 nt, Artificial Sequence
  Description of Artificial Sequence: Synthetic oligonucleotide
aagaggaguaaggucccaggu

SEQ ID NO: 4377 - RNA, 21 nt, Artificial Sequence
  Description of Artificial Sequence: Synthetic oligonucleotide
ugggaccuuacuccucuuucc

SEQ ID NO: 4378 - RNA, 21 nt, Artificial Sequence
  Description of Artificial Sequence: Synthetic oligonucleotide
aaagaggaguaaggucccagg

SEQ ID NO: 4379 - RNA, 21 nt, Artificial Sequence
  Description of Artificial Sequence: Synthetic oligonucleotide
gggaccuuacuccucuuuccu

SEQ ID NO: 4380 - RNA, 21 nt, Artificial Sequence
  Description of Artificial Sequence: Synthetic oligonucleotide
gaaagaggaguaaggucccag

SEQ ID NO: 4381 - RNA, 21 nt, Artificial Sequence
  Description of Artificial Sequence: Synthetic oligonucleotide
ggaccuuacuccucuuuccuu

SEQ ID NO: 4382 - RNA, 21 nt, Artificial Sequence
  Description of Artificial Sequence: Synthetic oligonucleotide
ggaaagaggaguaagguccca

SEQ ID NO: 4383 - RNA, 21 nt, Artificial Sequence
  Description of Artificial Sequence: Synthetic oligonucleotide
gaccuuacuccucuuuccuuc

SEQ ID NO: 4384 - RNA, 21 nt, Artificial Sequence
  Description of Artificial Sequence: Synthetic oligonucleotide
aggaaagaggaguaagguccc

SEQ ID NO: 4385 - RNA, 21 nt, Artificial Sequence
  Description of Artificial Sequence: Synthetic oligonucleotide
accuuacuccucuuuccuucc

SEQ ID NO: 4386 - RNA, 21 nt, Artificial Sequence
  Description of Artificial Sequence: Synthetic oligonucleotide
aaggaaagaggaguaaggucc

SEQ ID NO: 4387 - RNA, 21 nt, Artificial Sequence
  Description of Artificial Sequence: Synthetic oligonucleotide
ccuuacuccucuuuccuuccu

SEQ ID NO: 4388 - RNA, 21 nt, Artificial Sequence
  Description of Artificial Sequence: Synthetic oligonucleotide
gaaggaaagaggaguaagguc

SEQ ID NO: 4389 - RNA, 21 nt, Artificial Sequence
  Description of Artificial Sequence: Synthetic oligonucleotide
cuuacuccucuuuccuuccuu

SEQ ID NO: 4390 - RNA, 21 nt, Artificial Sequence
  Description of Artificial Sequence: Synthetic oligonucleotide
ggaaggaaagaggaguaaggu

SEQ ID NO: 4391 - RNA, 21 nt, Artificial Sequence
  Description of Artificial Sequence: Synthetic oligonucleotide
uuacuccucuuuccuuccuuc

SEQ ID NO: 4392 - RNA, 21 nt, Artificial Sequence
  Description of Artificial Sequence: Synthetic oligonucleotide
aggaaggaaagaggaguaagg

SEQ ID NO: 4393 - RNA, 21 nt, Artificial Sequence
  Description of Artificial Sequence: Synthetic oligonucleotide
uacuccucuuuccuuccuucc

SEQ ID NO: 4394 - RNA, 21 nt, Artificial Sequence
  Description of Artificial Sequence: Synthetic oligonucleotide
aaggaaggaaagaggaguaag

SEQ ID NO: 4395 - RNA, 21 nt, Artificial Sequence
  Description of Artificial Sequence: Synthetic oligonucleotide
acuccucuuuccuuccuuccu

SEQ ID NO: 4396 - RNA, 21 nt, Artificial Sequence
  Description of Artificial Sequence: Synthetic oligonucleotide
gaaggaaggaaagaggaguaa

SEQ ID NO: 4397 - RNA, 21 nt, Artificial Sequence
  Description of Artificial Sequence: Synthetic oligonucleotide
cuccucuuuccuuccuuccuc

SEQ ID NO: 4398 - RNA, 21 nt, Artificial Sequence
  Description of Artificial Sequence: Synthetic oligonucleotide
ggaaggaaggaaagaggagua

SEQ ID NO: 4399 - RNA, 21 nt, Artificial Sequence
  Description of Artificial Sequence: Synthetic oligonucleotide
uccucuuuccuuccuuccucc

SEQ ID NO: 4400 - RNA, 21 nt, Artificial Sequence
  Description of Artificial Sequence: Synthetic oligonucleotide
aggaaggaaggaaagaggagu

SEQ ID NO: 4401 - RNA, 21 nt, Artificial Sequence
  Description of Artificial Sequence: Synthetic oligonucleotide
ccucuuuccuuccuuccuccu

SEQ ID NO: 4402 - RNA, 21 nt, Artificial Sequence
  Description of Artificial Sequence: Synthetic oligonucleotide
gaggaaggaaggaaagaggag

SEQ ID NO: 4403 - RNA, 21 nt, Artificial Sequence
  Description of Artificial Sequence: Synthetic oligonucleotide
cucuuuccuuccuuccuccuu

SEQ ID NO: 4404 - RNA, 21 nt, Artificial Sequence
  Description of Artificial Sequence: Synthetic oligonucleotide
ggaggaaggaaggaaagagga

SEQ ID NO: 4405 - RNA, 21 nt, Artificial Sequence
  Description of Artificial Sequence: Synthetic oligonucleotide
ucuuuccuuccuuccuccuuu

SEQ ID NO: 4406 - RNA, 21 nt, Artificial Sequence
  Description of Artificial Sequence: Synthetic oligonucleotide
aggaggaaggaaggaaagagg

SEQ ID NO: 4407 - RNA, 21 nt, Artificial Sequence
  Description of Artificial Sequence: Synthetic oligonucleotide
cuuuccuuccuuccuccuuuc

SEQ ID NO: 4408 - RNA, 21 nt, Artificial Sequence
  Description of Artificial Sequence: Synthetic oligonucleotide
aaggaggaaggaaggaaagag

SEQ ID NO: 4409 - RNA, 21 nt, Artificial Sequence
  Description of Artificial Sequence: Synthetic oligonucleotide
uuuccuuccuuccuccuuucc

SEQ ID NO: 4410 - RNA, 21 nt, Artificial Sequence
  Description of Artificial Sequence: Synthetic oligonucleotide
aaaggaggaaggaaggaaaga

SEQ ID NO: 4411 - RNA, 21 nt, Artificial Sequence
  Description of Artificial Sequence: Synthetic oligonucleotide
uuccuuccuuccuccuuuccu

SEQ ID NO: 4412 - RNA, 21 nt, Artificial Sequence
  Description of Artificial Sequence: Synthetic oligonucleotide
gaaaggaggaaggaaggaaag

SEQ ID NO: 4413 - RNA, 21 nt, Artificial Sequence
  Description of Artificial Sequence: Synthetic oligonucleotide
uccuuccuuccuccuuuccua

SEQ ID NO: 4414 - RNA, 21 nt, Artificial Sequence
  Description of Artificial Sequence: Synthetic oligonucleotide
ggaaaggaggaaggaaggaaa

SEQ ID NO: 4415 - RNA, 21 nt, Artificial Sequence
  Description of Artificial Sequence: Synthetic oligonucleotide
ccuuccuuccuccuuuccuau

SEQ ID NO: 4416 - RNA, 21 nt, Artificial Sequence
  Description of Artificial Sequence: Synthetic oligonucleotide
aggaaaggaggaaggaaggaa

SEQ ID NO: 4417 - RNA, 21 nt, Artificial Sequence
  Description of Artificial Sequence: Synthetic oligonucleotide
cuuccuuccuccuuuccuauc

SEQ ID NO: 4418 - RNA, 21 nt, Artificial Sequence
  Description of Artificial Sequence: Synthetic oligonucleotide
uaggaaaggaggaaggaagga

SEQ ID NO: 4419 - RNA, 21 nt, Artificial Sequence
  Description of Artificial Sequence: Synthetic oligonucleotide
uuccuuccuccuuuccuaucu

SEQ ID NO: 4420 - RNA, 21 nt, Artificial Sequence
  Description of Artificial Sequence: Synthetic oligonucleotide
auaggaaaggaggaaggaagg

SEQ ID NO: 4421 - RNA, 21 nt, Artificial Sequence
  Description of Artificial Sequence: Synthetic oligonucleotide
uccuuccuccuuuccuaucuu

SEQ ID NO: 4422 - RNA, 21 nt, Artificial Sequence
  Description of Artificial Sequence: Synthetic oligonucleotide
gauaggaaaggaggaaggaag

SEQ ID NO: 4423 - RNA, 21 nt, Artificial Sequence
  Description of Artificial Sequence: Synthetic oligonucleotide
ccuuccuccuuuccuaucuuc

SEQ ID NO: 4424 - RNA, 21 nt, Artificial Sequence
  Description of Artificial Sequence: Synthetic oligonucleotide
agauaggaaaggaggaaggaa

SEQ ID NO: 4425 - RNA, 21 nt, Artificial Sequence
  Description of Artificial Sequence: Synthetic oligonucleotide
cuuccuccuuuccuaucuucc

SEQ ID NO: 4426 - RNA, 21 nt, Artificial Sequence
  Description of Artificial Sequence: Synthetic oligonucleotide
aagauaggaaaggaggaagga

SEQ ID NO: 4427 - RNA, 21 nt, Artificial Sequence
  Description of Artificial Sequence: Synthetic oligonucleotide
uuccuccuuuccuaucuuccu

SEQ ID NO: 4428 - RNA, 21 nt, Artificial Sequence
  Description of Artificial Sequence: Synthetic oligonucleotide
gaagauaggaaaggaggaagg

SEQ ID NO: 4429 - RNA, 21 nt, Artificial Sequence
  Description of Artificial Sequence: Synthetic oligonucleotide
uccuccuuuccuaucuuccuu

SEQ ID NO: 4430 - RNA, 21 nt, Artificial Sequence
  Description of Artificial Sequence: Synthetic oligonucleotide
ggaagauaggaaaggaggaag

SEQ ID NO: 4431 - RNA, 21 nt, Artificial Sequence
  Description of Artificial Sequence: Synthetic oligonucleotide
ccuccuuuccuaucuuccuuc

SEQ ID NO: 4432 - RNA, 21 nt, Artificial Sequence
  Description of Artificial Sequence: Synthetic oligonucleotide
aggaagauaggaaaggaggaa

SEQ ID NO: 4433 - RNA, 21 nt, Artificial Sequence
  Description of Artificial Sequence: Synthetic oligonucleotide
cuccuuuccuaucuuccuucc

SEQ ID NO: 4434 - RNA, 21 nt, Artificial Sequence
  Description of Artificial Sequence: Synthetic oligonucleotide
aaggaagauaggaaaggagga

SEQ ID NO: 4435 - RNA, 21 nt, Artificial Sequence
  Description of Artificial Sequence: Synthetic oligonucleotide
uccuuuccuaucuuccuuccu

SEQ ID NO: 4436 - RNA, 21 nt, Artificial Sequence
  Description of Artificial Sequence: Synthetic oligonucleotide
gaaggaagauaggaaaggagg

SEQ ID NO: 4437 - RNA, 21 nt, Artificial Sequence
  Description of Artificial Sequence: Synthetic oligonucleotide
ccuuuccuaucuuccuuccuc

SEQ ID NO: 4438 - RNA, 21 nt, Artificial Sequence
  Description of Artificial Sequence: Synthetic oligonucleotide
ggaaggaagauaggaaaggag

SEQ ID NO: 4439 - RNA, 21 nt, Artificial Sequence
  Description of Artificial Sequence: Synthetic oligonucleotide
cuuuccuaucuuccuuccucu

SEQ ID NO: 4440 - RNA, 21 nt, Artificial Sequence
  Description of Artificial Sequence: Synthetic oligonucleotide
aggaaggaagauaggaaagga

SEQ ID NO: 4441 - RNA, 21 nt, Artificial Sequence
  Description of Artificial Sequence: Synthetic oligonucleotide
uuuccuaucuuccuuccucuc

SEQ ID NO: 4442 - RNA, 21 nt, Artificial Sequence
  Description of Artificial Sequence: Synthetic oligonucleotide
gaggaaggaagauaggaaagg

SEQ ID NO: 4443 - RNA, 21 nt, Artificial Sequence
  Description of Artificial Sequence: Synthetic oligonucleotide
uuccuaucuuccuuccucucu

SEQ ID NO: 4444 - RNA, 21 nt, Artificial Sequence
  Description of Artificial Sequence: Synthetic oligonucleotide
agaggaaggaagauaggaaag

SEQ ID NO: 4445 - RNA, 21 nt, Artificial Sequence
  Description of Artificial Sequence: Synthetic oligonucleotide
uccuaucuuccuuccucucuc

SEQ ID NO: 4446 - RNA, 21 nt, Artificial Sequence
  Description of Artificial Sequence: Synthetic oligonucleotide
gagaggaaggaagauaggaaa

SEQ ID NO: 4447 - RNA, 21 nt, Artificial Sequence
  Description of Artificial Sequence: Synthetic oligonucleotide
ccuaucuuccuuccucucucu

SEQ ID NO: 4448 - RNA, 21 nt, Artificial Sequence
  Description of Artificial Sequence: Synthetic oligonucleotide
agagaggaaggaagauaggaa

SEQ ID NO: 4449 - RNA, 21 nt, Artificial Sequence
  Description of Artificial Sequence: Synthetic oligonucleotide
cuaucuuccuuccucucucuc

SEQ ID NO: 4450 - RNA, 21 nt, Artificial Sequence
  Description of Artificial Sequence: Synthetic oligonucleotide
gagagaggaaggaagauagga

SEQ ID NO: 4451 - RNA, 21 nt, Artificial Sequence
  Description of Artificial Sequence: Synthetic oligonucleotide
uaucuuccuuccucucucucu

SEQ ID NO: 4452 - RNA, 21 nt, Artificial Sequence
  Description of Artificial Sequence: Synthetic oligonucleotide
agagagaggaaggaagauagg

SEQ ID NO: 4453 - RNA, 21 nt, Artificial Sequence
  Description of Artificial Sequence: Synthetic oligonucleotide
aucuuccuuccucucucucuu

SEQ ID NO: 4454 - RNA, 21 nt, Artificial Sequence
  Description of Artificial Sequence: Synthetic oligonucleotide
gagagagaggaaggaagauag

SEQ ID NO: 4455 - RNA, 21 nt, Artificial Sequence
  Description of Artificial Sequence: Synthetic oligonucleotide
ucuuccuuccucucucucuuc

SEQ ID NO: 4456 - RNA, 21 nt, Artificial Sequence
  Description of Artificial Sequence: Synthetic oligonucleotide
agagagagaggaaggaagaua

SEQ ID NO: 4457 - RNA, 21 nt, Artificial Sequence
  Description of Artificial Sequence: Synthetic oligonucleotide
cuuccuuccucucucucuucc

SEQ ID NO: 4458 - RNA, 21 nt, Artificial Sequence
  Description of Artificial Sequence: Synthetic oligonucleotide
aagagagagaggaaggaagau

SEQ ID NO: 4459 - RNA, 21 nt, Artificial Sequence
  Description of Artificial Sequence: Synthetic oligonucleotide
uuccuuccucucucucuuccu

SEQ ID NO: 4460 - RNA, 21 nt, Artificial Sequence
  Description of Artificial Sequence: Synthetic oligonucleotide
gaagagagagaggaaggaaga

SEQ ID NO: 4461 - RNA, 21 nt, Artificial Sequence
  Description of Artificial Sequence: Synthetic oligonucleotide
uccuuccucucucucuuccuc

SEQ ID NO: 4462 - RNA, 21 nt, Artificial Sequence
  Description of Artificial Sequence: Synthetic oligonucleotide
ggaagagagagaggaaggaag

SEQ ID NO: 4463 - RNA, 21 nt, Artificial Sequence
  Description of Artificial Sequence: Synthetic oligonucleotide
ccuuccucucucucuuccucu

SEQ ID NO: 4464 - RNA, 21 nt, Artificial Sequence
  Description of Artificial Sequence: Synthetic oligonucleotide
aggaagagagagaggaaggaa

SEQ ID NO: 4465 - RNA, 21 nt, Artificial Sequence
  Description of Artificial Sequence: Synthetic oligonucleotide
cuuccucucucucuuccucuu

SEQ ID NO: 4466 - RNA, 21 nt, Artificial Sequence
  Description of Artificial Sequence: Synthetic oligonucleotide
gaggaagagagagaggaagga

SEQ ID NO: 4467 - RNA, 21 nt, Artificial Sequence
  Description of Artificial Sequence: Synthetic oligonucleotide
uuccucucucucuuccucuuu

SEQ ID NO: 4468 - RNA, 21 nt, Artificial Sequence
  Description of Artificial Sequence: Synthetic oligonucleotide
agaggaagagagagaggaagg

SEQ ID NO: 4469 - RNA, 21 nt, Artificial Sequence
  Description of Artificial Sequence: Synthetic oligonucleotide
uccucucucucuuccucuuuc

SEQ ID NO: 4470 - RNA, 21 nt, Artificial Sequence
  Description of Artificial Sequence: Synthetic oligonucleotide
aagaggaagagagagaggaag

SEQ ID NO: 4471 - RNA, 21 nt, Artificial Sequence
  Description of Artificial Sequence: Synthetic oligonucleotide
ccucucucucuuccucuuucu

SEQ ID NO: 4472 - RNA, 21 nt, Artificial Sequence
  Description of Artificial Sequence: Synthetic oligonucleotide
aaagaggaagagagagaggaa

SEQ ID NO: 4473 - RNA, 21 nt, Artificial Sequence
  Description of Artificial Sequence: Synthetic oligonucleotide
cucucucucuuccucuuucuu

SEQ ID NO: 4474 - RNA, 21 nt, Artificial Sequence
  Description of Artificial Sequence: Synthetic oligonucleotide
gaaagaggaagagagagagga

SEQ ID NO: 4475 - RNA, 21 nt, Artificial Sequence
  Description of Artificial Sequence: Synthetic oligonucleotide
ucucucucuuccucuuucuuc

SEQ ID NO: 4476 - RNA, 21 nt, Artificial Sequence
  Description of Artificial Sequence: Synthetic oligonucleotide
agaaagaggaagagagagagg

SEQ ID NO: 4477 - RNA, 21 nt, Artificial Sequence
  Description of Artificial Sequence: Synthetic oligonucleotide
cucucucuuccucuuucuuca

SEQ ID NO: 4478 - RNA, 21 nt, Artificial Sequence
  Description of Artificial Sequence: Synthetic oligonucleotide
aagaaagaggaagagagagag

SEQ ID NO: 4479 - RNA, 21 nt, Artificial Sequence
  Description of Artificial Sequence: Synthetic oligonucleotide
ucucucuuccucuuucuucau

SEQ ID NO: 4480 - RNA, 21 nt, Artificial Sequence
  Description of Artificial Sequence: Synthetic oligonucleotide
gaagaaagaggaagagagaga

SEQ ID NO: 4481 - RNA, 21 nt, Artificial Sequence
  Description of Artificial Sequence: Synthetic oligonucleotide
cucucuuccucuuucuucauu

SEQ ID NO: 4482 - RNA, 21 nt, Artificial Sequence
  Description of Artificial Sequence: Synthetic oligonucleotide
ugaagaaagaggaagagagag

SEQ ID NO: 4483 - RNA, 21 nt, Artificial Sequence
  Description of Artificial Sequence: Synthetic oligonucleotide
ucucuuccucuuucuucauuc

SEQ ID NO: 4484 - RNA, 21 nt, Artificial Sequence
  Description of Artificial Sequence: Synthetic oligonucleotide
augaagaaagaggaagagaga

SEQ ID NO: 4485 - RNA, 21 nt, Artificial Sequence
  Description of Artificial Sequence: Synthetic oligonucleotide
cucuuccucuuucuucauuca

SEQ ID NO: 4486 - RNA, 21 nt, Artificial Sequence
  Description of Artificial Sequence: Synthetic oligonucleotide
aaugaagaaagaggaagagag

SEQ ID NO: 4487 - RNA, 21 nt, Artificial Sequence
  Description of Artificial Sequence: Synthetic oligonucleotide
ucuuccucuuucuucauucag

SEQ ID NO: 4488 - RNA, 21 nt, Artificial Sequence
  Description of Artificial Sequence: Synthetic oligonucleotide
gaaugaagaaagaggaagaga

SEQ ID NO: 4489 - RNA, 21 nt, Artificial Sequence
  Description of Artificial Sequence: Synthetic oligonucleotide
cuuccucuuucuucauucaga

SEQ ID NO: 4490 - RNA, 21 nt, Artificial Sequence
  Description of Artificial Sequence: Synthetic oligonucleotide
ugaaugaagaaagaggaagag

SEQ ID NO: 4491 - RNA, 21 nt, Artificial Sequence
  Description of Artificial Sequence: Synthetic oligonucleotide
uuccucuuucuucauucagau

SEQ ID NO: 4492 - RNA, 21 nt, Artificial Sequence
  Description of Artificial Sequence: Synthetic oligonucleotide
cugaaugaagaaagaggaaga

SEQ ID NO: 4493 - RNA, 21 nt, Artificial Sequence
  Description of Artificial Sequence: Synthetic oligonucleotide
uccucuuucuucauucagauc

SEQ ID NO: 4494 - RNA, 21 nt, Artificial Sequence
  Description of Artificial Sequence: Synthetic oligonucleotide
ucugaaugaagaaagaggaag

SEQ ID NO: 4495 - RNA, 21 nt, Artificial Sequence
  Description of Artificial Sequence: Synthetic oligonucleotide
ccucuuucuucauucagaucu

SEQ ID NO: 4496 - RNA, 21 nt, Artificial Sequence
  Description of Artificial Sequence: Synthetic oligonucleotide
aucugaaugaagaaagaggaa

SEQ ID NO: 4497 - RNA, 21 nt, Artificial Sequence
  Description of Artificial Sequence: Synthetic oligonucleotide
cucuuucuucauucagaucua

SEQ ID NO: 4498 - RNA, 21 nt, Artificial Sequence
  Description of Artificial Sequence: Synthetic oligonucleotide
gaucugaaugaagaaagagga

SEQ ID NO: 4499 - RNA, 21 nt, Artificial Sequence
  Description of Artificial Sequence: Synthetic oligonucleotide
ucuuucuucauucagaucuau

SEQ ID NO: 4500 - RNA, 21 nt, Artificial Sequence
  Description of Artificial Sequence: Synthetic oligonucleotide
agaucugaaugaagaaagagg

SEQ ID NO: 4501 - RNA, 21 nt, Artificial Sequence
  Description of Artificial Sequence: Synthetic oligonucleotide
cuuucuucauucagaucuaua

SEQ ID NO: 4502 - RNA, 21 nt, Artificial Sequence
  Description of Artificial Sequence: Synthetic oligonucleotide
uagaucugaaugaagaaagag

SEQ ID NO: 4503 - RNA, 21 nt, Artificial Sequence
  Description of Artificial Sequence: Synthetic oligonucleotide
uuucuucauucagaucuauau

SEQ ID NO: 4504 - RNA, 21 nt, Artificial Sequence
  Description of Artificial Sequence: Synthetic oligonucleotide
auagaucugaaugaagaaaga

SEQ ID NO: 4505 - RNA, 21 nt, Artificial Sequence
  Description of Artificial Sequence: Synthetic oligonucleotide
uucuucauucagaucuauaug

SEQ ID NO: 4506 - RNA, 21 nt, Artificial Sequence
  Description of Artificial Sequence: Synthetic oligonucleotide
uauagaucugaaugaagaaag

SEQ ID NO: 4507 - RNA, 21 nt, Artificial Sequence
  Description of Artificial Sequence: Synthetic oligonucleotide
ucuucauucagaucuauaugg

SEQ ID NO: 4508 - RNA, 21 nt, Artificial Sequence
  Description of Artificial Sequence: Synthetic oligonucleotide
auauagaucugaaugaagaaa

SEQ ID NO: 4509 - RNA, 21 nt, Artificial Sequence
  Description of Artificial Sequence: Synthetic oligonucleotide
cuucauucagaucuauauggc

SEQ ID NO: 4510 - RNA, 21 nt, Artificial Sequence
  Description of Artificial Sequence: Synthetic oligonucleotide
cauauagaucugaaugaagaa

SEQ ID NO: 4511 - RNA, 21 nt, Artificial Sequence
  Description of Artificial Sequence: Synthetic oligonucleotide
uucauucagaucuauauggca

SEQ ID NO: 4512 - RNA, 21 nt, Artificial Sequence
  Description of Artificial Sequence: Synthetic oligonucleotide
ccauauagaucugaaugaaga

SEQ ID NO: 4513 - RNA, 21 nt, Artificial Sequence
  Description of Artificial Sequence: Synthetic oligonucleotide
ucauucagaucuauauggcaa

SEQ ID NO: 4514 - RNA, 21 nt, Artificial Sequence
  Description of Artificial Sequence: Synthetic oligonucleotide
gccauauagaucugaaugaag

SEQ ID NO: 4515 - RNA, 21 nt, Artificial Sequence
  Description of Artificial Sequence: Synthetic oligonucleotide
cauucagaucuauauggcaaa

SEQ ID NO: 4516 - RNA, 21 nt, Artificial Sequence
  Description of Artificial Sequence: Synthetic oligonucleotide
ugccauauagaucugaaugaa

SEQ ID NO: 4517 - RNA, 21 nt, Artificial Sequence
  Description of Artificial Sequence: Synthetic oligonucleotide
auucagaucuauauggcaaau

SEQ ID NO: 4518 - RNA, 21 nt, Artificial Sequence
  Description of Artificial Sequence: Synthetic oligonucleotide
uugccauauagaucugaauga

SEQ ID NO: 4519 - RNA, 21 nt, Artificial Sequence
  Description of Artificial Sequence: Synthetic oligonucleotide
uucagaucuauauggcaaaua

SEQ ID NO: 4520 - RNA, 21 nt, Artificial Sequence
  Description of Artificial Sequence: Synthetic oligonucleotide
uuugccauauagaucugaaug

SEQ ID NO: 4521 - RNA, 21 nt, Artificial Sequence
  Description of Artificial Sequence: Synthetic oligonucleotide
ucagaucuauauggcaaauag

SEQ ID NO: 4522 - RNA, 21 nt, Artificial Sequence
  Description of Artificial Sequence: Synthetic oligonucleotide
auuugccauauagaucugaau

SEQ ID NO: 4523 - RNA, 21 nt, Artificial Sequence
  Description of Artificial Sequence: Synthetic oligonucleotide
cagaucuauauggcaaauagc

SEQ ID NO: 4524 - RNA, 21 nt, Artificial Sequence
  Description of Artificial Sequence: Synthetic oligonucleotide
uauuugccauauagaucugaa

SEQ ID NO: 4525 - RNA, 21 nt, Artificial Sequence
  Description of Artificial Sequence: Synthetic oligonucleotide
agaucuauauggcaaauagcc

SEQ ID NO: 4526 - RNA, 21 nt, Artificial Sequence
  Description of Artificial Sequence: Synthetic oligonucleotide
cuauuugccauauagaucuga

SEQ ID NO: 4527 - RNA, 21 nt, Artificial Sequence
  Description of Artificial Sequence: Synthetic oligonucleotide
gaucuauauggcaaauagcca

SEQ ID NO: 4528 - RNA, 21 nt, Artificial Sequence
  Description of Artificial Sequence: Synthetic oligonucleotide
gcuauuugccauauagaucug

SEQ ID NO: 4529 - RNA, 21 nt, Artificial Sequence
  Description of Artificial Sequence: Synthetic oligonucleotide
aucuauauggcaaauagccac

SEQ ID NO: 4530 - RNA, 21 nt, Artificial Sequence
  Description of Artificial Sequence: Synthetic oligonucleotide
ggcuauuugccauauagaucu

SEQ ID NO: 4531 - RNA, 21 nt, Artificial Sequence
  Description of Artificial Sequence: Synthetic oligonucleotide
ucuauauggcaaauagccaca

SEQ ID NO: 4532 - RNA, 21 nt, Artificial Sequence
  Description of Artificial Sequence: Synthetic oligonucleotide
uggcuauuugccauauagauc

SEQ ID NO: 4533 - RNA, 21 nt, Artificial Sequence
  Description of Artificial Sequence: Synthetic oligonucleotide
cuauauggcaaauagccacaa

SEQ ID NO: 4534 - RNA, 21 nt, Artificial Sequence
  Description of Artificial Sequence: Synthetic oligonucleotide
guggcuauuugccauauagau

SEQ ID NO: 4535 - RNA, 21 nt, Artificial Sequence
  Description of Artificial Sequence: Synthetic oligonucleotide
uauauggcaaauagccacaau

SEQ ID NO: 4536 - RNA, 21 nt, Artificial Sequence
  Description of Artificial Sequence: Synthetic oligonucleotide
uguggcuauuugccauauaga

SEQ ID NO: 4537 - RNA, 21 nt, Artificial Sequence
  Description of Artificial Sequence: Synthetic oligonucleotide
auauggcaaauagccacaauu

SEQ ID NO: 4538 - RNA, 21 nt, Artificial Sequence
  Description of Artificial Sequence: Synthetic oligonucleotide
uuguggcuauuugccauauag

SEQ ID NO: 4539 - RNA, 21 nt, Artificial Sequence
  Description of Artificial Sequence: Synthetic oligonucleotide
uauggcaaauagccacaauua

SEQ ID NO: 4540 - RNA, 21 nt, Artificial Sequence
  Description of Artificial Sequence: Synthetic oligonucleotide
auuguggcuauuugccauaua

SEQ ID NO: 4541 - RNA, 21 nt, Artificial Sequence
  Description of Artificial Sequence: Synthetic oligonucleotide
auggcaaauagccacaauuau

SEQ ID NO: 4542 - RNA, 21 nt, Artificial Sequence
  Description of Artificial Sequence: Synthetic oligonucleotide
aauuguggcuauuugccauau

SEQ ID NO: 4543 - RNA, 21 nt, Artificial Sequence
  Description of Artificial Sequence: Synthetic oligonucleotide
uggcaaauagccacaauuaua

SEQ ID NO: 4544 - RNA, 21 nt, Artificial Sequence
  Description of Artificial Sequence: Synthetic oligonucleotide
uaauuguggcuauuugccaua

SEQ ID NO: 4545 - RNA, 21 nt, Artificial Sequence
  Description of Artificial Sequence: Synthetic oligonucleotide
ggcaaauagccacaauuauau

SEQ ID NO: 4546 - RNA, 21 nt, Artificial Sequence
  Description of Artificial Sequence: Synthetic oligonucleotide
auaauuguggcuauuugccau

SEQ ID NO: 4547 - RNA, 21 nt, Artificial Sequence
  Description of Artificial Sequence: Synthetic oligonucleotide
gcaaauagccacaauuauaua

SEQ ID NO: 4548 - RNA, 21 nt, Artificial Sequence
  Description of Artificial Sequence: Synthetic oligonucleotide
uauaauuguggcuauuugcca

SEQ ID NO: 4549 - RNA, 21 nt, Artificial Sequence
  Description of Artificial Sequence: Synthetic oligonucleotide
caaauagccacaauuauauaa

SEQ ID NO: 4550 - RNA, 21 nt, Artificial Sequence
  Description of Artificial Sequence: Synthetic oligonucleotide
auauaauuguggcuauuugcc

SEQ ID NO: 4551 - RNA, 21 nt, Artificial Sequence
  Description of Artificial Sequence: Synthetic oligonucleotide
aaauagccacaauuauauaaa

SEQ ID NO: 4552 - RNA, 21 nt, Artificial Sequence
  Description of Artificial Sequence: Synthetic oligonucleotide
uauauaauuguggcuauuugc

SEQ ID NO: 4553 - RNA, 21 nt, Artificial Sequence
  Description of Artificial Sequence: Synthetic oligonucleotide
aauagccacaauuauauaaau

SEQ ID NO: 4554 - RNA, 21 nt, Artificial Sequence
  Description of Artificial Sequence: Synthetic oligonucleotide
uuauauaauuguggcuauuug

SEQ ID NO: 4555 - RNA, 21 nt, Artificial Sequence
  Description of Artificial Sequence: Synthetic oligonucleotide
auagccacaauuauauaaauc

SEQ ID NO: 4556 - RNA, 21 nt, Artificial Sequence
  Description of Artificial Sequence: Synthetic oligonucleotide
uuuauauaauuguggcuauuu

SEQ ID NO: 4557 - RNA, 21 nt, Artificial Sequence
  Description of Artificial Sequence: Synthetic oligonucleotide
uagccacaauuauauaaauca

SEQ ID NO: 4558 - RNA, 21 nt, Artificial Sequence
  Description of Artificial Sequence: Synthetic oligonucleotide
auuuauauaauuguggcuauu

SEQ ID NO: 4559 - RNA, 21 nt, Artificial Sequence
  Description of Artificial Sequence: Synthetic oligonucleotide
agccacaauuauauaaaucau

SEQ ID NO: 4560 - RNA, 21 nt, Artificial Sequence
  Description of Artificial Sequence: Synthetic oligonucleotide
gauuuauauaauuguggcuau

SEQ ID NO: 4561 - RNA, 21 nt, Artificial Sequence
  Description of Artificial Sequence: Synthetic oligonucleotide
gccacaauuauauaaaucauu

SEQ ID NO: 4562 - RNA, 21 nt, Artificial Sequence
  Description of Artificial Sequence: Synthetic oligonucleotide
ugauuuauauaauuguggcua

SEQ ID NO: 4563 - RNA, 21 nt, Artificial Sequence
  Description of Artificial Sequence: Synthetic oligonucleotide
ccacaauuauauaaaucauuu

SEQ ID NO: 4564 - RNA, 21 nt, Artificial Sequence
  Description of Artificial Sequence: Synthetic oligonucleotide
augauuuauauaauuguggcu

SEQ ID NO: 4565 - RNA, 21 nt, Artificial Sequence
  Description of Artificial Sequence: Synthetic oligonucleotide
cacaauuauauaaaucauuuc

SEQ ID NO: 4566 - RNA, 21 nt, Artificial Sequence
  Description of Artificial Sequence: Synthetic oligonucleotide
aaugauuuauauaauuguggc

SEQ ID NO: 4567 - RNA, 21 nt, Artificial Sequence
  Description of Artificial Sequence: Synthetic oligonucleotide
acaauuauauaaaucauuuca

SEQ ID NO: 4568 - RNA, 21 nt, Artificial Sequence
  Description of Artificial Sequence: Synthetic oligonucleotide
aaaugauuuauauaauugugg

SEQ ID NO: 4569 - RNA, 21 nt, Artificial Sequence
  Description of Artificial Sequence: Synthetic oligonucleotide
caauuauauaaaucauuucaa

SEQ ID NO: 4570 - RNA, 21 nt, Artificial Sequence
  Description of Artificial Sequence: Synthetic oligonucleotide
gaaaugauuuauauaauugug

SEQ ID NO: 4571 - RNA, 21 nt, Artificial Sequence
  Description of Artificial Sequence: Synthetic oligonucleotide
aauuauauaaaucauuucaag

SEQ ID NO: 4572 - RNA, 21 nt, Artificial Sequence
  Description of Artificial Sequence: Synthetic oligonucleotide
ugaaaugauuuauauaauugu

SEQ ID NO: 4573 - RNA, 21 nt, Artificial Sequence
  Description of Artificial Sequence: Synthetic oligonucleotide
auuauauaaaucauuucaaga

SEQ ID NO: 4574 - RNA, 21 nt, Artificial Sequence
  Description of Artificial Sequence: Synthetic oligonucleotide
uugaaaugauuuauauaauug

SEQ ID NO: 4575 - RNA, 21 nt, Artificial Sequence
  Description of Artificial Sequence: Synthetic oligonucleotide
uuauauaaaucauuucaagac

SEQ ID NO: 4576 - RNA, 21 nt, Artificial Sequence
  Description of Artificial Sequence: Synthetic oligonucleotide
cuugaaaugauuuauauaauu

SEQ ID NO: 4577 - RNA, 21 nt, Artificial Sequence
  Description of Artificial Sequence: Synthetic oligonucleotide
uauauaaaucauuucaagacu

SEQ ID NO: 4578 - RNA, 21 nt, Artificial Sequence
  Description of Artificial Sequence: Synthetic oligonucleotide
ucuugaaaugauuuauauaau

SEQ ID NO: 4579 - RNA, 21 nt, Artificial Sequence
  Description of Artificial Sequence: Synthetic oligonucleotide
auauaaaucauuucaagacua

SEQ ID NO: 4580 - RNA, 21 nt, Artificial Sequence
  Description of Artificial Sequence: Synthetic oligonucleotide
gucuugaaaugauuuauauaa

SEQ ID NO: 4581 - RNA, 21 nt, Artificial Sequence
  Description of Artificial Sequence: Synthetic oligonucleotide
uauaaaucauuucaagacuag

SEQ ID NO: 4582 - RNA, 21 nt, Artificial Sequence
  Description of Artificial Sequence: Synthetic oligonucleotide
agucuugaaaugauuuauaua

SEQ ID NO: 4583 - RNA, 21 nt, Artificial Sequence
  Description of Artificial Sequence: Synthetic oligonucleotide
auaaaucauuucaagacuaga

SEQ ID NO: 4584 - RNA, 21 nt, Artificial Sequence
  Description of Artificial Sequence: Synthetic oligonucleotide
uagucuugaaaugauuuauau

SEQ ID NO: 4585 - RNA, 21 nt, Artificial Sequence
  Description of Artificial Sequence: Synthetic oligonucleotide
uaaaucauuucaagacuagaa

SEQ ID NO: 4586 - RNA, 21 nt, Artificial Sequence
  Description of Artificial Sequence: Synthetic oligonucleotide
cuagucuugaaaugauuuaua

SEQ ID NO: 4587 - RNA, 21 nt, Artificial Sequence
  Description of Artificial Sequence: Synthetic oligonucleotide
aaaucauuucaagacuagaau

SEQ ID NO: 4588 - RNA, 21 nt, Artificial Sequence
  Description of Artificial Sequence: Synthetic oligonucleotide
ucuagucuugaaaugauuuau

SEQ ID NO: 4589 - RNA, 21 nt, Artificial Sequence
  Description of Artificial Sequence: Synthetic oligonucleotide
aaucauuucaagacuagaaua

SEQ ID NO: 4590 - RNA, 21 nt, Artificial Sequence
  Description of Artificial Sequence: Synthetic oligonucleotide
uucuagucuugaaaugauuua

SEQ ID NO: 4591 - RNA, 21 nt, Artificial Sequence
  Description of Artificial Sequence: Synthetic oligonucleotide
aucauuucaagacuagaauag

SEQ ID NO: 4592 - RNA, 21 nt, Artificial Sequence
  Description of Artificial Sequence: Synthetic oligonucleotide
auucuagucuugaaaugauuu

SEQ ID NO: 4593 - RNA, 21 nt, Artificial Sequence
  Description of Artificial Sequence: Synthetic oligonucleotide
ucauuucaagacuagaauagg

SEQ ID NO: 4594 - RNA, 21 nt, Artificial Sequence
  Description of Artificial Sequence: Synthetic oligonucleotide
uauucuagucuugaaaugauu

SEQ ID NO: 4595 - RNA, 21 nt, Artificial Sequence
  Description of Artificial Sequence: Synthetic oligonucleotide
cauuucaagacuagaauaggg

SEQ ID NO: 4596 - RNA, 21 nt, Artificial Sequence
  Description of Artificial Sequence: Synthetic oligonucleotide
cuauucuagucuugaaaugau

SEQ ID NO: 4597 - RNA, 21 nt, Artificial Sequence
  Description of Artificial Sequence: Synthetic oligonucleotide
auuucaagacuagaauagggg

SEQ ID NO: 4598 - RNA, 21 nt, Artificial Sequence
  Description of Artificial Sequence: Synthetic oligonucleotide
ccuauucuagucuugaaauga

SEQ ID NO: 4599 - RNA, 21 nt, Artificial Sequence
  Description of Artificial Sequence: Synthetic oligonucleotide
uuucaagacuagaauaggggg

SEQ ID NO: 4600 - RNA, 21 nt, Artificial Sequence
  Description of Artificial Sequence: Synthetic oligonucleotide
cccuauucuagucuugaaaug

SEQ ID NO: 4601 - RNA, 21 nt, Artificial Sequence
  Description of Artificial Sequence: Synthetic oligonucleotide
uucaagacuagaauaggggga

SEQ ID NO: 4602 - RNA, 21 nt, Artificial Sequence
  Description of Artificial Sequence: Synthetic oligonucleotide
ccccuauucuagucuugaaau

SEQ ID NO: 4603 - RNA, 21 nt, Artificial Sequence
  Description of Artificial Sequence: Synthetic oligonucleotide
ucaagacuagaauagggggau

SEQ ID NO: 4604 - RNA, 21 nt, Artificial Sequence
  Description of Artificial Sequence: Synthetic oligonucleotide
cccccuauucuagucuugaaa

SEQ ID NO: 4605 - RNA, 21 nt, Artificial Sequence
  Description of Artificial Sequence: Synthetic oligonucleotide
caagacuagaauagggggaua

SEQ ID NO: 4606 - RNA, 21 nt, Artificial Sequence
  Description of Artificial Sequence: Synthetic oligonucleotide
ucccccuauucuagucuugaa

SEQ ID NO: 4607 - RNA, 21 nt, Artificial Sequence
  Description of Artificial Sequence: Synthetic oligonucleotide
aagacuagaauagggggauau

SEQ ID NO: 4608 - RNA, 21 nt, Artificial Sequence
  Description of Artificial Sequence: Synthetic oligonucleotide
aucccccuauucuagucuuga

SEQ ID NO: 4609 - RNA, 21 nt, Artificial Sequence
  Description of Artificial Sequence: Synthetic oligonucleotide
agacuagaauagggggauaua

SEQ ID NO: 4610 - RNA, 21 nt, Artificial Sequence
  Description of Artificial Sequence: Synthetic oligonucleotide
uaucccccuauucuagucuug

SEQ ID NO: 4611 - RNA, 21 nt, Artificial Sequence
  Description of Artificial Sequence: Synthetic oligonucleotide
gacuagaauagggggauauaa

SEQ ID NO: 4612 - RNA, 21 nt, Artificial Sequence
  Description of Artificial Sequence: Synthetic oligonucleotide
auaucccccuauucuagucuu

SEQ ID NO: 4613 - RNA, 21 nt, Artificial Sequence
  Description of Artificial Sequence: Synthetic oligonucleotide
acuagaauagggggauauaau

SEQ ID NO: 4614 - RNA, 21 nt, Artificial Sequence
  Description of Artificial Sequence: Synthetic oligonucleotide
uauaucccccuauucuagucu

SEQ ID NO: 4615 - RNA, 21 nt, Artificial Sequence
  Description of Artificial Sequence: Synthetic oligonucleotide
cuagaauagggggauauaaua

SEQ ID NO: 4616 - RNA, 21 nt, Artificial Sequence
  Description of Artificial Sequence: Synthetic oligonucleotide
uuauaucccccuauucuaguc

SEQ ID NO: 4617 - RNA, 21 nt, Artificial Sequence
  Description of Artificial Sequence: Synthetic oligonucleotide
uagaauagggggauauaauac

SEQ ID NO: 4618 - RNA, 21 nt, Artificial Sequence
  Description of Artificial Sequence: Synthetic oligonucleotide
auuauaucccccuauucuagu

SEQ ID NO: 4619 - RNA, 21 nt, Artificial Sequence
  Description of Artificial Sequence: Synthetic oligonucleotide
agaauagggggauauaauaca

SEQ ID NO: 4620 - RNA, 21 nt, Artificial Sequence
  Description of Artificial Sequence: Synthetic oligonucleotide
uauuauaucccccuauucuag

SEQ ID NO: 4621 - RNA, 21 nt, Artificial Sequence
  Description of Artificial Sequence: Synthetic oligonucleotide
gaauagggggauauaauacau

SEQ ID NO: 4622 - RNA, 21 nt, Artificial Sequence
  Description of Artificial Sequence: Synthetic oligonucleotide
guauuauaucccccuauucua

SEQ ID NO: 4623 - RNA, 21 nt, Artificial Sequence
  Description of Artificial Sequence: Synthetic oligonucleotide
aauagggggauauaauacaua

SEQ ID NO: 4624 - RNA, 21 nt, Artificial Sequence
  Description of Artificial Sequence: Synthetic oligonucleotide
uguauuauaucccccuauucu

SEQ ID NO: 4625 - RNA, 21 nt, Artificial Sequence
  Description of Artificial Sequence: Synthetic oligonucleotide
auagggggauauaauacauau

SEQ ID NO: 4626 - RNA, 21 nt, Artificial Sequence
  Description of Artificial Sequence: Synthetic oligonucleotide
auguauuauaucccccuauuc

SEQ ID NO: 4627 - RNA, 21 nt, Artificial Sequence
  Description of Artificial Sequence: Synthetic oligonucleotide
uagggggauauaauacauauu

SEQ ID NO: 4628 - RNA, 21 nt, Artificial Sequence
  Description of Artificial Sequence: Synthetic oligonucleotide
uauguauuauaucccccuauu

SEQ ID NO: 4629 - RNA, 21 nt, Artificial Sequence
  Description of Artificial Sequence: Synthetic oligonucleotide
agggggauauaauacauauua

SEQ ID NO: 4630 - RNA, 21 nt, Artificial Sequence
  Description of Artificial Sequence: Synthetic oligonucleotide
auauguauuauaucccccuau

SEQ ID NO: 4631 - RNA, 21 nt, Artificial Sequence
  Description of Artificial Sequence: Synthetic oligonucleotide
gggggauauaauacauauuac

SEQ ID NO: 4632 - RNA, 21 nt, Artificial Sequence
  Description of Artificial Sequence: Synthetic oligonucleotide
aauauguauuauaucccccua

SEQ ID NO: 4633 - RNA, 21 nt, Artificial Sequence
  Description of Artificial Sequence: Synthetic oligonucleotide
ggggauauaauacauauuacu

SEQ ID NO: 4634 - RNA, 21 nt, Artificial Sequence
  Description of Artificial Sequence: Synthetic oligonucleotide
uaauauguauuauaucccccu

SEQ ID NO: 4635 - RNA, 21 nt, Artificial Sequence
  Description of Artificial Sequence: Synthetic oligonucleotide
gggauauaauacauauuacuc

SEQ ID NO: 4636 - RNA, 21 nt, Artificial Sequence
  Description of Artificial Sequence: Synthetic oligonucleotide
guaauauguauuauauccccc

SEQ ID NO: 4637 - RNA, 21 nt, Artificial Sequence
  Description of Artificial Sequence: Synthetic oligonucleotide
ggauauaauacauauuacucc

SEQ ID NO: 4638 - RNA, 21 nt, Artificial Sequence
  Description of Artificial Sequence: Synthetic oligonucleotide
aguaauauguauuauaucccc

SEQ ID NO: 4639 - RNA, 21 nt, Artificial Sequence
  Description of Artificial Sequence: Synthetic oligonucleotide
gauauaauacauauuacucca

SEQ ID NO: 4640 - RNA, 21 nt, Artificial Sequence
  Description of Artificial Sequence: Synthetic oligonucleotide
gaguaauauguauuauauccc

SEQ ID NO: 4641 - RNA, 21 nt, Artificial Sequence
  Description of Artificial Sequence: Synthetic oligonucleotide
auauaauacauauuacuccac

SEQ ID NO: 4642 - RNA, 21 nt, Artificial Sequence
  Description of Artificial Sequence: Synthetic oligonucleotide
ggaguaauauguauuauaucc

SEQ ID NO: 4643 - RNA, 21 nt, Artificial Sequence
  Description of Artificial Sequence: Synthetic oligonucleotide
uauaauacauauuacuccaca

SEQ ID NO: 4644 - RNA, 21 nt, Artificial Sequence
  Description of Artificial Sequence: Synthetic oligonucleotide
uggaguaauauguauuauauc

SEQ ID NO: 4645 - RNA, 21 nt, Artificial Sequence
  Description of Artificial Sequence: Synthetic oligonucleotide
auaauacauauuacuccacac

SEQ ID NO: 4646 - RNA, 21 nt, Artificial Sequence
  Description of Artificial Sequence: Synthetic oligonucleotide
guggaguaauauguauuauau

SEQ ID NO: 4647 - RNA, 21 nt, Artificial Sequence
  Description of Artificial Sequence: Synthetic oligonucleotide
uaauacauauuacuccacacc

SEQ ID NO: 4648 - RNA, 21 nt, Artificial Sequence
  Description of Artificial Sequence: Synthetic oligonucleotide
uguggaguaauauguauuaua

SEQ ID NO: 4649 - RNA, 21 nt, Artificial Sequence
  Description of Artificial Sequence: Synthetic oligonucleotide
aauacauauuacuccacaccu

SEQ ID NO: 4650 - RNA, 21 nt, Artificial Sequence
  Description of Artificial Sequence: Synthetic oligonucleotide
guguggaguaauauguauuau

SEQ ID NO: 4651 - RNA, 21 nt, Artificial Sequence
  Description of Artificial Sequence: Synthetic oligonucleotide
auacauauuacuccacaccuu

SEQ ID NO: 4652 - RNA, 21 nt, Artificial Sequence
  Description of Artificial Sequence: Synthetic oligonucleotide
gguguggaguaauauguauua

SEQ ID NO: 4653 - RNA, 21 nt, Artificial Sequence
  Description of Artificial Sequence: Synthetic oligonucleotide
uacauauuacuccacaccuuu

SEQ ID NO: 4654 - RNA, 21 nt, Artificial Sequence
  Description of Artificial Sequence: Synthetic oligonucleotide
agguguggaguaauauguauu

SEQ ID NO: 4655 - RNA, 21 nt, Artificial Sequence
  Description of Artificial Sequence: Synthetic oligonucleotide
acauauuacuccacaccuuuu

SEQ ID NO: 4656 - RNA, 21 nt, Artificial Sequence
  Description of Artificial Sequence: Synthetic oligonucleotide
aagguguggaguaauauguau

SEQ ID NO: 4657 - RNA, 21 nt, Artificial Sequence
  Description of Artificial Sequence: Synthetic oligonucleotide
cauauuacuccacaccuuuua

SEQ ID NO: 4658 - RNA, 21 nt, Artificial Sequence
  Description of Artificial Sequence: Synthetic oligonucleotide
aaagguguggaguaauaugua

SEQ ID NO: 4659 - RNA, 21 nt, Artificial Sequence
  Description of Artificial Sequence: Synthetic oligonucleotide
auauuacuccacaccuuuuau

SEQ ID NO: 4660 - RNA, 21 nt, Artificial Sequence
  Description of Artificial Sequence: Synthetic oligonucleotide
aaaagguguggaguaauaugu

SEQ ID NO: 4661 - RNA, 21 nt, Artificial Sequence
  Description of Artificial Sequence: Synthetic oligonucleotide
uauuacuccacaccuuuuaug

SEQ ID NO: 4662 - RNA, 21 nt, Artificial Sequence
  Description of Artificial Sequence: Synthetic oligonucleotide
uaaaagguguggaguaauaug

SEQ ID NO: 4663 - RNA, 21 nt, Artificial Sequence
  Description of Artificial Sequence: Synthetic oligonucleotide
auuacuccacaccuuuuauga

SEQ ID NO: 4664 - RNA, 21 nt, Artificial Sequence
  Description of Artificial Sequence: Synthetic oligonucleotide
auaaaagguguggaguaauau

SEQ ID NO: 4665 - RNA, 21 nt, Artificial Sequence
  Description of Artificial Sequence: Synthetic oligonucleotide
uuacuccacaccuuuuaugaa

SEQ ID NO: 4666 - RNA, 21 nt, Artificial Sequence
  Description of Artificial Sequence: Synthetic oligonucleotide
cauaaaagguguggaguaaua

SEQ ID NO: 4667 - RNA, 21 nt, Artificial Sequence
  Description of Artificial Sequence: Synthetic oligonucleotide
uacuccacaccuuuuaugaau

SEQ ID NO: 4668 - RNA, 21 nt, Artificial Sequence
  Description of Artificial Sequence: Synthetic oligonucleotide
ucauaaaagguguggaguaau

SEQ ID NO: 4669 - RNA, 21 nt, Artificial Sequence
  Description of Artificial Sequence: Synthetic oligonucleotide
acuccacaccuuuuaugaauc

SEQ ID NO: 4670 - RNA, 21 nt, Artificial Sequence
  Description of Artificial Sequence: Synthetic oligonucleotide
uucauaaaagguguggaguaa

SEQ ID NO: 4671 - RNA, 21 nt, Artificial Sequence
  Description of Artificial Sequence: Synthetic oligonucleotide
cuccacaccuuuuaugaauca

SEQ ID NO: 4672 - RNA, 21 nt, Artificial Sequence
  Description of Artificial Sequence: Synthetic oligonucleotide
auucauaaaagguguggagua

SEQ ID NO: 4673 - RNA, 21 nt, Artificial Sequence
  Description of Artificial Sequence: Synthetic oligonucleotide
uccacaccuuuuaugaaucaa

SEQ ID NO: 4674 - RNA, 21 nt, Artificial Sequence
  Description of Artificial Sequence: Synthetic oligonucleotide
gauucauaaaagguguggagu

SEQ ID NO: 4675 - RNA, 21 nt, Artificial Sequence
  Description of Artificial Sequence: Synthetic oligonucleotide
ccacaccuuuuaugaaucaaa

SEQ ID NO: 4676 - RNA, 21 nt, Artificial Sequence
  Description of Artificial Sequence: Synthetic oligonucleotide
ugauucauaaaagguguggag

SEQ ID NO: 4677 - RNA, 21 nt, Artificial Sequence
  Description of Artificial Sequence: Synthetic oligonucleotide
cacaccuuuuaugaaucaaau

SEQ ID NO: 4678 - RNA, 21 nt, Artificial Sequence
  Description of Artificial Sequence: Synthetic oligonucleotide
uugauucauaaaaggugugga

SEQ ID NO: 4679 - RNA, 21 nt, Artificial Sequence
  Description of Artificial Sequence: Synthetic oligonucleotide
acaccuuuuaugaaucaaaua

SEQ ID NO: 4680 - RNA, 21 nt, Artificial Sequence
  Description of Artificial Sequence: Synthetic oligonucleotide
uuugauucauaaaaggugugg

SEQ ID NO: 4681 - RNA, 21 nt, Artificial Sequence
  Description of Artificial Sequence: Synthetic oligonucleotide
caccuuuuaugaaucaaauau

SEQ ID NO: 4682 - RNA, 21 nt, Artificial Sequence
  Description of Artificial Sequence: Synthetic oligonucleotide
auuugauucauaaaaggugug

SEQ ID NO: 4683 - RNA, 21 nt, Artificial Sequence
  Description of Artificial Sequence: Synthetic oligonucleotide
accuuuuaugaaucaaauaug

SEQ ID NO: 4684 - RNA, 21 nt, Artificial Sequence
  Description of Artificial Sequence: Synthetic oligonucleotide
uauuugauucauaaaaggugu

SEQ ID NO: 4685 - RNA, 21 nt, Artificial Sequence
  Description of Artificial Sequence: Synthetic oligonucleotide
ccuuuuaugaaucaaauauga

SEQ ID NO: 4686 - RNA, 21 nt, Artificial Sequence
  Description of Artificial Sequence: Synthetic oligonucleotide
auauuugauucauaaaaggug

SEQ ID NO: 4687 - RNA, 21 nt, Artificial Sequence
  Description of Artificial Sequence: Synthetic oligonucleotide
cuuuuaugaaucaaauaugau

SEQ ID NO: 4688 - RNA, 21 nt, Artificial Sequence
  Description of Artificial Sequence: Synthetic oligonucleotide
cauauuugauucauaaaaggu

SEQ ID NO: 4689 - RNA, 21 nt, Artificial Sequence
  Description of Artificial Sequence: Synthetic oligonucleotide
uuuuaugaaucaaauaugauu

SEQ ID NO: 4690 - RNA, 21 nt, Artificial Sequence
  Description of Artificial Sequence: Synthetic oligonucleotide
ucauauuugauucauaaaagg

SEQ ID NO: 4691 - RNA, 21 nt, Artificial Sequence
  Description of Artificial Sequence: Synthetic oligonucleotide
uuuaugaaucaaauaugauuu

SEQ ID NO: 4692 - RNA, 21 nt, Artificial Sequence
  Description of Artificial Sequence: Synthetic oligonucleotide
aucauauuugauucauaaaag

SEQ ID NO: 4693 - RNA, 21 nt, Artificial Sequence
  Description of Artificial Sequence: Synthetic oligonucleotide
uuaugaaucaaauaugauuuu

SEQ ID NO: 4694 - RNA, 21 nt, Artificial Sequence
  Description of Artificial Sequence: Synthetic oligonucleotide
aaucauauuugauucauaaaa

SEQ ID NO: 4695 - RNA, 21 nt, Artificial Sequence
  Description of Artificial Sequence: Synthetic oligonucleotide
uaugaaucaaauaugauuuuu

SEQ ID NO: 4696 - RNA, 21 nt, Artificial Sequence
  Description of Artificial Sequence: Synthetic oligonucleotide
aaaucauauuugauucauaaa

SEQ ID NO: 4697 - RNA, 21 nt, Artificial Sequence
  Description of Artificial Sequence: Synthetic oligonucleotide
augaaucaaauaugauuuuuu

SEQ ID NO: 4698 - RNA, 21 nt, Artificial Sequence
  Description of Artificial Sequence: Synthetic oligonucleotide
aaaaucauauuugauucauaa

SEQ ID NO: 4699 - RNA, 21 nt, Artificial Sequence
  Description of Artificial Sequence: Synthetic oligonucleotide
ugaaucaaauaugauuuuuuu

SEQ ID NO: 4700 - RNA, 21 nt, Artificial Sequence
  Description of Artificial Sequence: Synthetic oligonucleotide
aaaaaucauauuugauucaua

SEQ ID NO: 4701 - RNA, 21 nt, Artificial Sequence
  Description of Artificial Sequence: Synthetic oligonucleotide
gaaucaaauaugauuuuuuug

SEQ ID NO: 4702 - RNA, 21 nt, Artificial Sequence
  Description of Artificial Sequence: Synthetic oligonucleotide
aaaaaaucauauuugauucau

SEQ ID NO: 4703 - RNA, 21 nt, Artificial Sequence
  Description of Artificial Sequence: Synthetic oligonucleotide
aaucaaauaugauuuuuuugu

SEQ ID NO: 4704 - RNA, 21 nt, Artificial Sequence
  Description of Artificial Sequence: Synthetic oligonucleotide
aaaaaaaucauauuugauuca

SEQ ID NO: 4705 - RNA, 21 nt, Artificial Sequence
  Description of Artificial Sequence: Synthetic oligonucleotide
aucaaauaugauuuuuuuguu

SEQ ID NO: 4706 - RNA, 21 nt, Artificial Sequence
  Description of Artificial Sequence: Synthetic oligonucleotide
caaaaaaaucauauuugauuc

SEQ ID NO: 4707 - RNA, 21 nt, Artificial Sequence
  Description of Artificial Sequence: Synthetic oligonucleotide
ucaaauaugauuuuuuuguug

SEQ ID NO: 4708 - RNA, 21 nt, Artificial Sequence
  Description of Artificial Sequence: Synthetic oligonucleotide
acaaaaaaaucauauuugauu

SEQ ID NO: 4709 - RNA, 21 nt, Artificial Sequence
  Description of Artificial Sequence: Synthetic oligonucleotide
caaauaugauuuuuuuguugu

SEQ ID NO: 4710 - RNA, 21 nt, Artificial Sequence
  Description of Artificial Sequence: Synthetic oligonucleotide
aacaaaaaaaucauauuugau

SEQ ID NO: 4711 - RNA, 21 nt, Artificial Sequence
  Description of Artificial Sequence: Synthetic oligonucleotide
aaauaugauuuuuuuguuguu

SEQ ID NO: 4712 - RNA, 21 nt, Artificial Sequence
  Description of Artificial Sequence: Synthetic oligonucleotide
caacaaaaaaaucauauuuga

SEQ ID NO: 4713 - RNA, 21 nt, Artificial Sequence
  Description of Artificial Sequence: Synthetic oligonucleotide
aauaugauuuuuuuguuguug

SEQ ID NO: 4714 - RNA, 21 nt, Artificial Sequence
  Description of Artificial Sequence: Synthetic oligonucleotide
acaacaaaaaaaucauauuug

SEQ ID NO: 4715 - RNA, 21 nt, Artificial Sequence
  Description of Artificial Sequence: Synthetic oligonucleotide
auaugauuuuuuuguuguugu

SEQ ID NO: 4716 - RNA, 21 nt, Artificial Sequence
  Description of Artificial Sequence: Synthetic oligonucleotide
aacaacaaaaaaaucauauuu

SEQ ID NO: 4717 - RNA, 21 nt, Artificial Sequence
  Description of Artificial Sequence: Synthetic oligonucleotide
uaugauuuuuuuguuguuguu

SEQ ID NO: 4718 - RNA, 21 nt, Artificial Sequence
  Description of Artificial Sequence: Synthetic oligonucleotide
caacaacaaaaaaaucauauu

SEQ ID NO: 4719 - RNA, 21 nt, Artificial Sequence
  Description of Artificial Sequence: Synthetic oligonucleotide
augauuuuuuuguuguuguua

SEQ ID NO: 4720 - RNA, 21 nt, Artificial Sequence
  Description of Artificial Sequence: Synthetic oligonucleotide
acaacaacaaaaaaaucauau

SEQ ID NO: 4721 - RNA, 21 nt, Artificial Sequence
  Description of Artificial Sequence: Synthetic oligonucleotide
ugauuuuuuuguuguuguuaa

SEQ ID NO: 4722 - RNA, 21 nt, Artificial Sequence
  Description of Artificial Sequence: Synthetic oligonucleotide
aacaacaacaaaaaaaucaua

SEQ ID NO: 4723 - RNA, 21 nt, Artificial Sequence
  Description of Artificial Sequence: Synthetic oligonucleotide
gauuuuuuuguuguuguuaag

SEQ ID NO: 4724 - RNA, 21 nt, Artificial Sequence
  Description of Artificial Sequence: Synthetic oligonucleotide
uaacaacaacaaaaaaaucau

SEQ ID NO: 4725 - RNA, 21 nt, Artificial Sequence
  Description of Artificial Sequence: Synthetic oligonucleotide
auuuuuuuguuguuguuaaga

SEQ ID NO: 4726 - RNA, 21 nt, Artificial Sequence
  Description of Artificial Sequence: Synthetic oligonucleotide
uuaacaacaacaaaaaaauca

SEQ ID NO: 4727 - RNA, 21 nt, Artificial Sequence
  Description of Artificial Sequence: Synthetic oligonucleotide
uuuuuuuguuguuguuaagac

SEQ ID NO: 4728 - RNA, 21 nt, Artificial Sequence
  Description of Artificial Sequence: Synthetic oligonucleotide
cuuaacaacaacaaaaaaauc

SEQ ID NO: 4729 - RNA, 21 nt, Artificial Sequence
  Description of Artificial Sequence: Synthetic oligonucleotide
uuuuuuguuguuguuaagaca

SEQ ID NO: 4730 - RNA, 21 nt, Artificial Sequence
  Description of Artificial Sequence: Synthetic oligonucleotide
ucuuaacaacaacaaaaaaau

SEQ ID NO: 4731 - RNA, 21 nt, Artificial Sequence
  Description of Artificial Sequence: Synthetic oligonucleotide
uuuuuguuguuguuaagacag

SEQ ID NO: 4732 - RNA, 21 nt, Artificial Sequence
  Description of Artificial Sequence: Synthetic oligonucleotide
gucuuaacaacaacaaaaaaa

SEQ ID NO: 4733 - RNA, 21 nt, Artificial Sequence
  Description of Artificial Sequence: Synthetic oligonucleotide
uuuuguuguuguuaagacaga

SEQ ID NO: 4734 - RNA, 21 nt, Artificial Sequence
  Description of Artificial Sequence: Synthetic oligonucleotide
ugucuuaacaacaacaaaaaa

SEQ ID NO: 4735 - RNA, 21 nt, Artificial Sequence
  Description of Artificial Sequence: Synthetic oligonucleotide
uuuguuguuguuaagacagag

SEQ ID NO: 4736 - RNA, 21 nt, Artificial Sequence
  Description of Artificial Sequence: Synthetic oligonucleotide
cugucuuaacaacaacaaaaa

SEQ ID NO: 4737 - RNA, 21 nt, Artificial Sequence
  Description of Artificial Sequence: Synthetic oligonucleotide
uuguuguuguuaagacagagu

SEQ ID NO: 4738 - RNA, 21 nt, Artificial Sequence
  Description of Artificial Sequence: Synthetic oligonucleotide
ucugucuuaacaacaacaaaa

SEQ ID NO: 4739 - RNA, 21 nt, Artificial Sequence
  Description of Artificial Sequence: Synthetic oligonucleotide
uguuguuguuaagacagaguc

SEQ ID NO: 4740 - RNA, 21 nt, Artificial Sequence
  Description of Artificial Sequence: Synthetic oligonucleotide
cucugucuuaacaacaacaaa

SEQ ID NO: 4741 - RNA, 21 nt, Artificial Sequence
  Description of Artificial Sequence: Synthetic oligonucleotide
guuguuguuaagacagagucu

SEQ ID NO: 4742 - RNA, 21 nt, Artificial Sequence
  Description of Artificial Sequence: Synthetic oligonucleotide
acucugucuuaacaacaacaa

SEQ ID NO: 4743 - RNA, 21 nt, Artificial Sequence
  Description of Artificial Sequence: Synthetic oligonucleotide
uuguuguuaagacagagucuc

SEQ ID NO: 4744 - RNA, 21 nt, Artificial Sequence
  Description of Artificial Sequence: Synthetic oligonucleotide
gacucugucuuaacaacaaca

SEQ ID NO: 4745 - RNA, 21 nt, Artificial Sequence
  Description of Artificial Sequence: Synthetic oligonucleotide
uguuguuaagacagagucuca

SEQ ID NO: 4746 - RNA, 21 nt, Artificial Sequence
  Description of Artificial Sequence: Synthetic oligonucleotide
agacucugucuuaacaacaac

SEQ ID NO: 4747 - RNA, 21 nt, Artificial Sequence
  Description of Artificial Sequence: Synthetic oligonucleotide
guuguuaagacagagucucac

SEQ ID NO: 4748 - RNA, 21 nt, Artificial Sequence
  Description of Artificial Sequence: Synthetic oligonucleotide
gagacucugucuuaacaacaa

SEQ ID NO: 4749 - RNA, 21 nt, Artificial Sequence
  Description of Artificial Sequence: Synthetic oligonucleotide
uuguuaagacagagucucacu

SEQ ID NO: 4750 - RNA, 21 nt, Artificial Sequence
  Description of Artificial Sequence: Synthetic oligonucleotide
ugagacucugucuuaacaaca

SEQ ID NO: 4751 - RNA, 21 nt, Artificial Sequence
  Description of Artificial Sequence: Synthetic oligonucleotide
uguuaagacagagucucacuu

SEQ ID NO: 4752 - RNA, 21 nt, Artificial Sequence
  Description of Artificial Sequence: Synthetic oligonucleotide
gugagacucugucuuaacaac

SEQ ID NO: 4753 - RNA, 21 nt, Artificial Sequence
  Description of Artificial Sequence: Synthetic oligonucleotide
guuaagacagagucucacuuu

SEQ ID NO: 4754 - RNA, 21 nt, Artificial Sequence
  Description of Artificial Sequence: Synthetic oligonucleotide
agugagacucugucuuaacaa

SEQ ID NO: 4755 - RNA, 21 nt, Artificial Sequence
  Description of Artificial Sequence: Synthetic oligonucleotide
uuaagacagagucucacuuug

SEQ ID NO: 4756 - RNA, 21 nt, Artificial Sequence
  Description of Artificial Sequence: Synthetic oligonucleotide
aagugagacucugucuuaaca

SEQ ID NO: 4757 - RNA, 21 nt, Artificial Sequence
  Description of Artificial Sequence: Synthetic oligonucleotide
uaagacagagucucacuuuga

SEQ ID NO: 4758 - RNA, 21 nt, Artificial Sequence
  Description of Artificial Sequence: Synthetic oligonucleotide
aaagugagacucugucuuaac

SEQ ID NO: 4759 - RNA, 21 nt, Artificial Sequence
  Description of Artificial Sequence: Synthetic oligonucleotide
aagacagagucucacuuugac

SEQ ID NO: 4760 - RNA, 21 nt, Artificial Sequence
  Description of Artificial Sequence: Synthetic oligonucleotide
caaagugagacucugucuuaa

SEQ ID NO: 4761 - RNA, 21 nt, Artificial Sequence
  Description of Artificial Sequence: Synthetic oligonucleotide
agacagagucucacuuugaca

SEQ ID NO: 4762 - RNA, 21 nt, Artificial Sequence
  Description of Artificial Sequence: Synthetic oligonucleotide
ucaaagugagacucugucuua

SEQ ID NO: 4763 - RNA, 21 nt, Artificial Sequence
  Description of Artificial Sequence: Synthetic oligonucleotide
gacagagucucacuuugacac

SEQ ID NO: 4764 - RNA, 21 nt, Artificial Sequence
  Description of Artificial Sequence: Synthetic oligonucleotide
gucaaagugagacucugucuu

SEQ ID NO: 4765 - RNA, 21 nt, Artificial Sequence
  Description of Artificial Sequence: Synthetic oligonucleotide
acagagucucacuuugacacc

SEQ ID NO: 4766 - RNA, 21 nt, Artificial Sequence
  Description of Artificial Sequence: Synthetic oligonucleotide
ugucaaagugagacucugucu

SEQ ID NO: 4767 - RNA, 21 nt, Artificial Sequence
  Description of Artificial Sequence: Synthetic oligonucleotide
cagagucucacuuugacaccc

SEQ ID NO: 4768 - RNA, 21 nt, Artificial Sequence
  Description of Artificial Sequence: Synthetic oligonucleotide
gugucaaagugagacucuguc

SEQ ID NO: 4769 - RNA, 21 nt, Artificial Sequence
  Description of Artificial Sequence: Synthetic oligonucleotide
agagucucacuuugacaccca

SEQ ID NO: 4770 - RNA, 21 nt, Artificial Sequence
  Description of Artificial Sequence: Synthetic oligonucleotide
ggugucaaagugagacucugu

SEQ ID NO: 4771 - RNA, 21 nt, Artificial Sequence
  Description of Artificial Sequence: Synthetic oligonucleotide
gagucucacuuugacacccag

SEQ ID NO: 4772 - RNA, 21 nt, Artificial Sequence
  Description of Artificial Sequence: Synthetic oligonucleotide
gggugucaaagugagacucug

SEQ ID NO: 4773 - RNA, 21 nt, Artificial Sequence
  Description of Artificial Sequence: Synthetic oligonucleotide
agucucacuuugacacccagg

SEQ ID NO: 4774 - RNA, 21 nt, Artificial Sequence
  Description of Artificial Sequence: Synthetic oligonucleotide
ugggugucaaagugagacucu

SEQ ID NO: 4775 - RNA, 21 nt, Artificial Sequence
  Description of Artificial Sequence: Synthetic oligonucleotide
gucucacuuugacacccaggc

SEQ ID NO: 4776 - RNA, 21 nt, Artificial Sequence
  Description of Artificial Sequence: Synthetic oligonucleotide
cugggugucaaagugagacuc

SEQ ID NO: 4777 - RNA, 21 nt, Artificial Sequence
  Description of Artificial Sequence: Synthetic oligonucleotide
ucucacuuugacacccaggcu

SEQ ID NO: 4778 - RNA, 21 nt, Artificial Sequence
  Description of Artificial Sequence: Synthetic oligonucleotide
ccugggugucaaagugagacu

SEQ ID NO: 4779 - RNA, 21 nt, Artificial Sequence
  Description of Artificial Sequence: Synthetic oligonucleotide
cucacuuugacacccaggcug

SEQ ID NO: 4780 - RNA, 21 nt, Artificial Sequence
  Description of Artificial Sequence: Synthetic oligonucleotide
gccugggugucaaagugagac

SEQ ID NO: 4781 - RNA, 21 nt, Artificial Sequence
  Description of Artificial Sequence: Synthetic oligonucleotide
ucacuuugacacccaggcugg

SEQ ID NO: 4782 - RNA, 21 nt, Artificial Sequence
  Description of Artificial Sequence: Synthetic oligonucleotide
agccugggugucaaagugaga

SEQ ID NO: 4783 - RNA, 21 nt, Artificial Sequence
  Description of Artificial Sequence: Synthetic oligonucleotide
cacuuugacacccaggcugga

SEQ ID NO: 4784 - RNA, 21 nt, Artificial Sequence
  Description of Artificial Sequence: Synthetic oligonucleotide
cagccugggugucaaagugag

SEQ ID NO: 4785 - RNA, 21 nt, Artificial Sequence
  Description of Artificial Sequence: Synthetic oligonucleotide
acuuugacacccaggcuggag

SEQ ID NO: 4786 - RNA, 21 nt, Artificial Sequence
  Description of Artificial Sequence: Synthetic oligonucleotide
ccagccugggugucaaaguga

SEQ ID NO: 4787 - RNA, 21 nt, Artificial Sequence
  Description of Artificial Sequence: Synthetic oligonucleotide
cuuugacacccaggcuggagu

SEQ ID NO: 4788 - RNA, 21 nt, Artificial Sequence
  Description of Artificial Sequence: Synthetic oligonucleotide
uccagccugggugucaaagug

SEQ ID NO: 4789 - RNA, 21 nt, Artificial Sequence
  Description of Artificial Sequence: Synthetic oligonucleotide
uuugacacccaggcuggagug

SEQ ID NO: 4790 - RNA, 21 nt, Artificial Sequence
  Description of Artificial Sequence: Synthetic oligonucleotide
cuccagccugggugucaaagu

SEQ ID NO: 4791 - RNA, 21 nt, Artificial Sequence
  Description of Artificial Sequence: Synthetic oligonucleotide
uugacacccaggcuggagugc

SEQ ID NO: 4792 - RNA, 21 nt, Artificial Sequence
  Description of Artificial Sequence: Synthetic oligonucleotide
acuccagccugggugucaaag

SEQ ID NO: 4793 - RNA, 21 nt, Artificial Sequence
  Description of Artificial Sequence: Synthetic oligonucleotide
ugacacccaggcuggagugca

SEQ ID NO: 4794 - RNA, 21 nt, Artificial Sequence
  Description of Artificial Sequence: Synthetic oligonucleotide
cacuccagccugggugucaaa

SEQ ID NO: 4795 - RNA, 21 nt, Artificial Sequence
  Description of Artificial Sequence: Synthetic oligonucleotide
gacacccaggcuggagugcag

SEQ ID NO: 4796 - RNA, 21 nt, Artificial Sequence
  Description of Artificial Sequence: Synthetic oligonucleotide
gcacuccagccugggugucaa

SEQ ID NO: 4797 - RNA, 21 nt, Artificial Sequence
  Description of Artificial Sequence: Synthetic oligonucleotide
acacccaggcuggagugcagu

SEQ ID NO: 4798 - RNA, 21 nt, Artificial Sequence
  Description of Artificial Sequence: Synthetic oligonucleotide
ugcacuccagccuggguguca

SEQ ID NO: 4799 - RNA, 21 nt, Artificial Sequence
  Description of Artificial Sequence: Synthetic oligonucleotide
cacccaggcuggagugcagug

SEQ ID NO: 4800 - RNA, 21 nt, Artificial Sequence
  Description of Artificial Sequence: Synthetic oligonucleotide
cugcacuccagccuggguguc

SEQ ID NO: 4801 - RNA, 21 nt, Artificial Sequence
  Description of Artificial Sequence: Synthetic oligonucleotide
acccaggcuggagugcagugg

SEQ ID NO: 4802 - RNA, 21 nt, Artificial Sequence
  Description of Artificial Sequence: Synthetic oligonucleotide
acugcacuccagccugggugu

SEQ ID NO: 4803 - RNA, 21 nt, Artificial Sequence
  Description of Artificial Sequence: Synthetic oligonucleotide
cccaggcuggagugcaguggu

SEQ ID NO: 4804 - RNA, 21 nt, Artificial Sequence
  Description of Artificial Sequence: Synthetic oligonucleotide
cacugcacuccagccugggug

SEQ ID NO: 4805 - RNA, 21 nt, Artificial Sequence
  Description of Artificial Sequence: Synthetic oligonucleotide
ccaggcuggagugcaguggug

SEQ ID NO: 4806 - RNA, 21 nt, Artificial Sequence
  Description of Artificial Sequence: Synthetic oligonucleotide
ccacugcacuccagccugggu

SEQ ID NO: 4807 - RNA, 21 nt, Artificial Sequence
  Description of Artificial Sequence: Synthetic oligonucleotide
caggcuggagugcaguggugc

SEQ ID NO: 4808 - RNA, 21 nt, Artificial Sequence
  Description of Artificial Sequence: Synthetic oligonucleotide
accacugcacuccagccuggg

SEQ ID NO: 4809 - RNA, 21 nt, Artificial Sequence
  Description of Artificial Sequence: Synthetic oligonucleotide
aggcuggagugcaguggugcc

SEQ ID NO: 4810 - RNA, 21 nt, Artificial Sequence
  Description of Artificial Sequence: Synthetic oligonucleotide
caccacugcacuccagccugg

SEQ ID NO: 4811 - RNA, 21 nt, Artificial Sequence
  Description of Artificial Sequence: Synthetic oligonucleotide
ggcuggagugcaguggugcca

SEQ ID NO: 4812 - RNA, 21 nt, Artificial Sequence
  Description of Artificial Sequence: Synthetic oligonucleotide
gcaccacugcacuccagccug

SEQ ID NO: 4813 - RNA, 21 nt, Artificial Sequence
  Description of Artificial Sequence: Synthetic oligonucleotide
gcuggagugcaguggugccau

SEQ ID NO: 4814 - RNA, 21 nt, Artificial Sequence
  Description of Artificial Sequence: Synthetic oligonucleotide
ggcaccacugcacuccagccu

SEQ ID NO: 4815 - RNA, 21 nt, Artificial Sequence
  Description of Artificial Sequence: Synthetic oligonucleotide
cuggagugcaguggugccauc

SEQ ID NO: 4816 - RNA, 21 nt, Artificial Sequence
  Description of Artificial Sequence: Synthetic oligonucleotide
uggcaccacugcacuccagcc

SEQ ID NO: 4817 - RNA, 21 nt, Artificial Sequence
  Description of Artificial Sequence: Synthetic oligonucleotide
uggagugcaguggugccauca

SEQ ID NO: 4818 - RNA, 21 nt, Artificial Sequence
  Description of Artificial Sequence: Synthetic oligonucleotide
auggcaccacugcacuccagc

SEQ ID NO: 4819 - RNA, 21 nt, Artificial Sequence
  Description of Artificial Sequence: Synthetic oligonucleotide
ggagugcaguggugccaucac

SEQ ID NO: 4820 - RNA, 21 nt, Artificial Sequence
  Description of Artificial Sequence: Synthetic oligonucleotide
gauggcaccacugcacuccag

SEQ ID NO: 4821 - RNA, 21 nt, Artificial Sequence
  Description of Artificial Sequence: Synthetic oligonucleotide
gagugcaguggugccaucacc

SEQ ID NO: 4822 - RNA, 21 nt, Artificial Sequence
  Description of Artificial Sequence: Synthetic oligonucleotide
ugauggcaccacugcacucca

SEQ ID NO: 4823 - RNA, 21 nt, Artificial Sequence
  Description of Artificial Sequence: Synthetic oligonucleotide
agugcaguggugccaucacca

SEQ ID NO: 4824 - RNA, 21 nt, Artificial Sequence
  Description of Artificial Sequence: Synthetic oligonucleotide
gugauggcaccacugcacucc

SEQ ID NO: 4825 - RNA, 21 nt, Artificial Sequence
  Description of Artificial Sequence: Synthetic oligonucleotide
gugcaguggugccaucaccac

SEQ ID NO: 4826 - RNA, 21 nt, Artificial Sequence
  Description of Artificial Sequence: Synthetic oligonucleotide
ggugauggcaccacugcacuc

SEQ ID NO: 4827 - RNA, 21 nt, Artificial Sequence
  Description of Artificial Sequence: Synthetic oligonucleotide
ugcaguggugccaucaccacg

SEQ ID NO: 4828 - RNA, 21 nt, Artificial Sequence
  Description of Artificial Sequence: Synthetic oligonucleotide
uggugauggcaccacugcacu

SEQ ID NO: 4829 - RNA, 21 nt, Artificial Sequence
  Description of Artificial Sequence: Synthetic oligonucleotide
gcaguggugccaucaccacgg

SEQ ID NO: 4830 - RNA, 21 nt, Artificial Sequence
  Description of Artificial Sequence: Synthetic oligonucleotide
guggugauggcaccacugcac

SEQ ID NO: 4831 - RNA, 21 nt, Artificial Sequence
  Description of Artificial Sequence: Synthetic oligonucleotide
caguggugccaucaccacggc

SEQ ID NO: 4832 - RNA, 21 nt, Artificial Sequence
  Description of Artificial Sequence: Synthetic oligonucleotide
cguggugauggcaccacugca

SEQ ID NO: 4833 - RNA, 21 nt, Artificial Sequence
  Description of Artificial Sequence: Synthetic oligonucleotide
aguggugccaucaccacggcu

SEQ ID NO: 4834 - RNA, 21 nt, Artificial Sequence
  Description of Artificial Sequence: Synthetic oligonucleotide
ccguggugauggcaccacugc

SEQ ID NO: 4835 - RNA, 21 nt, Artificial Sequence
  Description of Artificial Sequence: Synthetic oligonucleotide
guggugccaucaccacggcuc

SEQ ID NO: 4836 - RNA, 21 nt, Artificial Sequence
  Description of Artificial Sequence: Synthetic oligonucleotide
gccguggugauggcaccacug

SEQ ID NO: 4837 - RNA, 21 nt, Artificial Sequence
  Description of Artificial Sequence: Synthetic oligonucleotide
uggugccaucaccacggcuca

SEQ ID NO: 4838 - RNA, 21 nt, Artificial Sequence
  Description of Artificial Sequence: Synthetic oligonucleotide
agccguggugauggcaccacu

SEQ ID NO: 4839 - RNA, 21 nt, Artificial Sequence
  Description of Artificial Sequence: Synthetic oligonucleotide
ggugccaucaccacggcucac

SEQ ID NO: 4840 - RNA, 21 nt, Artificial Sequence
  Description of Artificial Sequence: Synthetic oligonucleotide
gagccguggugauggcaccac

SEQ ID NO: 4841 - RNA, 21 nt, Artificial Sequence
  Description of Artificial Sequence: Synthetic oligonucleotide
gugccaucaccacggcucacu

SEQ ID NO: 4842 - RNA, 21 nt, Artificial Sequence
  Description of Artificial Sequence: Synthetic oligonucleotide
ugagccguggugauggcacca

SEQ ID NO: 4843 - RNA, 21 nt, Artificial Sequence
  Description of Artificial Sequence: Synthetic oligonucleotide
ugccaucaccacggcucacug

SEQ ID NO: 4844 - RNA, 21 nt, Artificial Sequence
  Description of Artificial Sequence: Synthetic oligonucleotide
gugagccguggugauggcacc

SEQ ID NO: 4845 - RNA, 21 nt, Artificial Sequence
  Description of Artificial Sequence: Synthetic oligonucleotide
gccaucaccacggcucacugc

SEQ ID NO: 4846 - RNA, 21 nt, Artificial Sequence
  Description of Artificial Sequence: Synthetic oligonucleotide
agugagccguggugauggcac

SEQ ID NO: 4847 - RNA, 21 nt, Artificial Sequence
  Description of Artificial Sequence: Synthetic oligonucleotide
ccaucaccacggcucacugca

SEQ ID NO: 4848 - RNA, 21 nt, Artificial Sequence
  Description of Artificial Sequence: Synthetic oligonucleotide
cagugagccguggugauggca

SEQ ID NO: 4849 - RNA, 21 nt, Artificial Sequence
  Description of Artificial Sequence: Synthetic oligonucleotide
caucaccacggcucacugcag

SEQ ID NO: 4850 - RNA, 21 nt, Artificial Sequence
  Description of Artificial Sequence: Synthetic oligonucleotide
gcagugagccguggugauggc

SEQ ID NO: 4851 - RNA, 21 nt, Artificial Sequence
  Description of Artificial Sequence: Synthetic oligonucleotide
aucaccacggcucacugcagc

SEQ ID NO: 4852 - RNA, 21 nt, Artificial Sequence
  Description of Artificial Sequence: Synthetic oligonucleotide
ugcagugagccguggugaugg

SEQ ID NO: 4853 - RNA, 21 nt, Artificial Sequence
  Description of Artificial Sequence: Synthetic oligonucleotide
ucaccacggcucacugcagcc

SEQ ID NO: 4854 - RNA, 21 nt, Artificial Sequence
  Description of Artificial Sequence: Synthetic oligonucleotide
cugcagugagccguggugaug

SEQ ID NO: 4855 - RNA, 21 nt, Artificial Sequence
  Description of Artificial Sequence: Synthetic oligonucleotide
caccacggcucacugcagccu

SEQ ID NO: 4856 - RNA, 21 nt, Artificial Sequence
  Description of Artificial Sequence: Synthetic oligonucleotide
gcugcagugagccguggugau

SEQ ID NO: 4857 - RNA, 21 nt, Artificial Sequence
  Description of Artificial Sequence: Synthetic oligonucleotide
accacggcucacugcagccuc

SEQ ID NO: 4858 - RNA, 21 nt, Artificial Sequence
  Description of Artificial Sequence: Synthetic oligonucleotide
ggcugcagugagccgugguga

SEQ ID NO: 4859 - RNA, 21 nt, Artificial Sequence
  Description of Artificial Sequence: Synthetic oligonucleotide
ccacggcucacugcagccuca

SEQ ID NO: 4860 - RNA, 21 nt, Artificial Sequence
  Description of Artificial Sequence: Synthetic oligonucleotide
aggcugcagugagccguggug

SEQ ID NO: 4861 - RNA, 21 nt, Artificial Sequence
  Description of Artificial Sequence: Synthetic oligonucleotide
cacggcucacugcagccucag

SEQ ID NO: 4862 - RNA, 21 nt, Artificial Sequence
  Description of Artificial Sequence: Synthetic oligonucleotide
gaggcugcagugagccguggu

SEQ ID NO: 4863 - RNA, 21 nt, Artificial Sequence
  Description of Artificial Sequence: Synthetic oligonucleotide
acggcucacugcagccucagc

SEQ ID NO: 4864 - RNA, 21 nt, Artificial Sequence
  Description of Artificial Sequence: Synthetic oligonucleotide
ugaggcugcagugagccgugg

SEQ ID NO: 4865 - RNA, 21 nt, Artificial Sequence
  Description of Artificial Sequence: Synthetic oligonucleotide
cggcucacugcagccucagcg

SEQ ID NO: 4866 - RNA, 21 nt, Artificial Sequence
  Description of Artificial Sequence: Synthetic oligonucleotide
cugaggcugcagugagccgug

SEQ ID NO: 4867 - RNA, 21 nt, Artificial Sequence
  Description of Artificial Sequence: Synthetic oligonucleotide
ggcucacugcagccucagcgu

SEQ ID NO: 4868 - RNA, 21 nt, Artificial Sequence
  Description of Artificial Sequence: Synthetic oligonucleotide
gcugaggcugcagugagccgu

SEQ ID NO: 4869 - RNA, 21 nt, Artificial Sequence
  Description of Artificial Sequence: Synthetic oligonucleotide
gcucacugcagccucagcguc

SEQ ID NO: 4870 - RNA, 21 nt, Artificial Sequence
  Description of Artificial Sequence: Synthetic oligonucleotide
cgcugaggcugcagugagccg

SEQ ID NO: 4871 - RNA, 21 nt, Artificial Sequence
  Description of Artificial Sequence: Synthetic oligonucleotide
cucacugcagccucagcgucc

SEQ ID NO: 4872 - RNA, 21 nt, Artificial Sequence
  Description of Artificial Sequence: Synthetic oligonucleotide
acgcugaggcugcagugagcc

SEQ ID NO: 4873 - RNA, 21 nt, Artificial Sequence
  Description of Artificial Sequence: Synthetic oligonucleotide
ucacugcagccucagcguccu

SEQ ID NO: 4874 - RNA, 21 nt, Artificial Sequence
  Description of Artificial Sequence: Synthetic oligonucleotide
gacgcugaggcugcagugagc

SEQ ID NO: 4875 - RNA, 21 nt, Artificial Sequence
  Description of Artificial Sequence: Synthetic oligonucleotide
cacugcagccucagcguccug

SEQ ID NO: 4876 - RNA, 21 nt, Artificial Sequence
  Description of Artificial Sequence: Synthetic oligonucleotide
ggacgcugaggcugcagugag

SEQ ID NO: 4877 - RNA, 21 nt, Artificial Sequence
  Description of Artificial Sequence: Synthetic oligonucleotide
acugcagccucagcguccugg

SEQ ID NO: 4878 - RNA, 21 nt, Artificial Sequence
  Description of Artificial Sequence: Synthetic oligonucleotide
aggacgcugaggcugcaguga

SEQ ID NO: 4879 - RNA, 21 nt, Artificial Sequence
  Description of Artificial Sequence: Synthetic oligonucleotide
cugcagccucagcguccuggg

SEQ ID NO: 4880 - RNA, 21 nt, Artificial Sequence
  Description of Artificial Sequence: Synthetic oligonucleotide
caggacgcugaggcugcagug

SEQ ID NO: 4881 - RNA, 21 nt, Artificial Sequence
  Description of Artificial Sequence: Synthetic oligonucleotide
ugcagccucagcguccugggc

SEQ ID NO: 4882 - RNA, 21 nt, Artificial Sequence
  Description of Artificial Sequence: Synthetic oligonucleotide
ccaggacgcugaggcugcagu

SEQ ID NO: 4883 - RNA, 21 nt, Artificial Sequence
  Description of Artificial Sequence: Synthetic oligonucleotide
gcagccucagcguccugggcu

SEQ ID NO: 4884 - RNA, 21 nt, Artificial Sequence
  Description of Artificial Sequence: Synthetic oligonucleotide
cccaggacgcugaggcugcag

SEQ ID NO: 4885 - RNA, 21 nt, Artificial Sequence
  Description of Artificial Sequence: Synthetic oligonucleotide
cagccucagcguccugggcuc

SEQ ID NO: 4886 - RNA, 21 nt, Artificial Sequence
  Description of Artificial Sequence: Synthetic oligonucleotide
gcccaggacgcugaggcugca

SEQ ID NO: 4887 - RNA, 21 nt, Artificial Sequence
  Description of Artificial Sequence: Synthetic oligonucleotide
agccucagcguccugggcuca

SEQ ID NO: 4888 - RNA, 21 nt, Artificial Sequence
  Description of Artificial Sequence: Synthetic oligonucleotide
agcccaggacgcugaggcugc

SEQ ID NO: 4889 - RNA, 21 nt, Artificial Sequence
  Description of Artificial Sequence: Synthetic oligonucleotide
gccucagcguccugggcucaa

SEQ ID NO: 4890 - RNA, 21 nt, Artificial Sequence
  Description of Artificial Sequence: Synthetic oligonucleotide
gagcccaggacgcugaggcug

SEQ ID NO: 4891 - RNA, 21 nt, Artificial Sequence
  Description of Artificial Sequence: Synthetic oligonucleotide
ccucagcguccugggcucaaa

SEQ ID NO: 4892 - RNA, 21 nt, Artificial Sequence
  Description of Artificial Sequence: Synthetic oligonucleotide
ugagcccaggacgcugaggcu

SEQ ID NO: 4893 - RNA, 21 nt, Artificial Sequence
  Description of Artificial Sequence: Synthetic oligonucleotide
cucagcguccugggcucaaau

SEQ ID NO: 4894 - RNA, 21 nt, Artificial Sequence
  Description of Artificial Sequence: Synthetic oligonucleotide
uugagcccaggacgcugaggc

SEQ ID NO: 4895 - RNA, 21 nt, Artificial Sequence
  Description of Artificial Sequence: Synthetic oligonucleotide
ucagcguccugggcucaaaug

SEQ ID NO: 4896 - RNA, 21 nt, Artificial Sequence
  Description of Artificial Sequence: Synthetic oligonucleotide
uuugagcccaggacgcugagg

SEQ ID NO: 4897 - RNA, 21 nt, Artificial Sequence
  Description of Artificial Sequence: Synthetic oligonucleotide
cagcguccugggcucaaauga

SEQ ID NO: 4898 - RNA, 21 nt, Artificial Sequence
  Description of Artificial Sequence: Synthetic oligonucleotide
auuugagcccaggacgcugag

SEQ ID NO: 4899 - RNA, 21 nt, Artificial Sequence
  Description of Artificial Sequence: Synthetic oligonucleotide
agcguccugggcucaaaugau

SEQ ID NO: 4900 - RNA, 21 nt, Artificial Sequence
  Description of Artificial Sequence: Synthetic oligonucleotide
cauuugagcccaggacgcuga

SEQ ID NO: 4901 - RNA, 21 nt, Artificial Sequence
  Description of Artificial Sequence: Synthetic oligonucleotide
gcguccugggcucaaaugauc

SEQ ID NO: 4902 - RNA, 21 nt, Artificial Sequence
  Description of Artificial Sequence: Synthetic oligonucleotide
ucauuugagcccaggacgcug

SEQ ID NO: 4903 - RNA, 21 nt, Artificial Sequence
  Description of Artificial Sequence: Synthetic oligonucleotide
cguccugggcucaaaugaucc

SEQ ID NO: 4904 - RNA, 21 nt, Artificial Sequence
  Description of Artificial Sequence: Synthetic oligonucleotide
aucauuugagcccaggacgcu

SEQ ID NO: 4905 - RNA, 21 nt, Artificial Sequence
  Description of Artificial Sequence: Synthetic oligonucleotide
guccugggcucaaaugauccu

SEQ ID NO: 4906 - RNA, 21 nt, Artificial Sequence
  Description of Artificial Sequence: Synthetic oligonucleotide
gaucauuugagcccaggacgc

SEQ ID NO: 4907 - RNA, 21 nt, Artificial Sequence
  Description of Artificial Sequence: Synthetic oligonucleotide
uccugggcucaaaugauccuc

SEQ ID NO: 4908 - RNA, 21 nt, Artificial Sequence
  Description of Artificial Sequence: Synthetic oligonucleotide
ggaucauuugagcccaggacg

SEQ ID NO: 4909 - RNA, 21 nt, Artificial Sequence
  Description of Artificial Sequence: Synthetic oligonucleotide
ccugggcucaaaugauccucc

SEQ ID NO: 4910 - RNA, 21 nt, Artificial Sequence
  Description of Artificial Sequence: Synthetic oligonucleotide
aggaucauuugagcccaggac

SEQ ID NO: 4911 - RNA, 21 nt, Artificial Sequence
  Description of Artificial Sequence: Synthetic oligonucleotide
cugggcucaaaugauccuccc

SEQ ID NO: 4912 - RNA, 21 nt, Artificial Sequence
  Description of Artificial Sequence: Synthetic oligonucleotide
gaggaucauuugagcccagga

SEQ ID NO: 4913 - RNA, 21 nt, Artificial Sequence
  Description of Artificial Sequence: Synthetic oligonucleotide
ugggcucaaaugauccuccca

SEQ ID NO: 4914 - RNA, 21 nt, Artificial Sequence
  Description of Artificial Sequence: Synthetic oligonucleotide
ggaggaucauuugagcccagg

SEQ ID NO: 4915 - RNA, 21 nt, Artificial Sequence
  Description of Artificial Sequence: Synthetic oligonucleotide
gggcucaaaugauccucccac

SEQ ID NO: 4916 - RNA, 21 nt, Artificial Sequence
  Description of Artificial Sequence: Synthetic oligonucleotide
gggaggaucauuugagcccag

SEQ ID NO: 4917 - RNA, 21 nt, Artificial Sequence
  Description of Artificial Sequence: Synthetic oligonucleotide
ggcucaaaugauccucccacc

SEQ ID NO: 4918 - RNA, 21 nt, Artificial Sequence
  Description of Artificial Sequence: Synthetic oligonucleotide
ugggaggaucauuugagccca

SEQ ID NO: 4919 - RNA, 21 nt, Artificial Sequence
  Description of Artificial Sequence: Synthetic oligonucleotide
gcucaaaugauccucccaccu

SEQ ID NO: 4920 - RNA, 21 nt, Artificial Sequence
  Description of Artificial Sequence: Synthetic oligonucleotide
gugggaggaucauuugagccc

SEQ ID NO: 4921 - RNA, 21 nt, Artificial Sequence
  Description of Artificial Sequence: Synthetic oligonucleotide
cucaaaugauccucccaccuc

SEQ ID NO: 4922 - RNA, 21 nt, Artificial Sequence
  Description of Artificial Sequence: Synthetic oligonucleotide
ggugggaggaucauuugagcc

SEQ ID NO: 4923 - RNA, 21 nt, Artificial Sequence
  Description of Artificial Sequence: Synthetic oligonucleotide
ucaaaugauccucccaccuca

SEQ ID NO: 4924 - RNA, 21 nt, Artificial Sequence
  Description of Artificial Sequence: Synthetic oligonucleotide
aggugggaggaucauuugagc

SEQ ID NO: 4925 - RNA, 21 nt, Artificial Sequence
  Description of Artificial Sequence: Synthetic oligonucleotide
caaaugauccucccaccucag

SEQ ID NO: 4926 - RNA, 21 nt, Artificial Sequence
  Description of Artificial Sequence: Synthetic oligonucleotide
gaggugggaggaucauuugag

SEQ ID NO: 4927 - RNA, 21 nt, Artificial Sequence
  Description of Artificial Sequence: Synthetic oligonucleotide
aaaugauccucccaccucagc

SEQ ID NO: 4928 - RNA, 21 nt, Artificial Sequence
  Description of Artificial Sequence: Synthetic oligonucleotide
ugaggugggaggaucauuuga

SEQ ID NO: 4929 - RNA, 21 nt, Artificial Sequence
  Description of Artificial Sequence: Synthetic oligonucleotide
aaugauccucccaccucagcc

SEQ ID NO: 4930 - RNA, 21 nt, Artificial Sequence
  Description of Artificial Sequence: Synthetic oligonucleotide
cugaggugggaggaucauuug

SEQ ID NO: 4931 - RNA, 21 nt, Artificial Sequence
  Description of Artificial Sequence: Synthetic oligonucleotide
augauccucccaccucagccu

SEQ ID NO: 4932 - RNA, 21 nt, Artificial Sequence
  Description of Artificial Sequence: Synthetic oligonucleotide
gcugaggugggaggaucauuu

SEQ ID NO: 4933 - RNA, 21 nt, Artificial Sequence
  Description of Artificial Sequence: Synthetic oligonucleotide
ugauccucccaccucagccuc

SEQ ID NO: 4934 - RNA, 21 nt, Artificial Sequence
  Description of Artificial Sequence: Synthetic oligonucleotide
ggcugaggugggaggaucauu

SEQ ID NO: 4935 - RNA, 21 nt, Artificial Sequence
  Description of Artificial Sequence: Synthetic oligonucleotide
gauccucccaccucagccucc

SEQ ID NO: 4936 - RNA, 21 nt, Artificial Sequence
  Description of Artificial Sequence: Synthetic oligonucleotide
aggcugaggugggaggaucau

SEQ ID NO: 4937 - RNA, 21 nt, Artificial Sequence
  Description of Artificial Sequence: Synthetic oligonucleotide
auccucccaccucagccuccu

SEQ ID NO: 4938 - RNA, 21 nt, Artificial Sequence
  Description of Artificial Sequence: Synthetic oligonucleotide
gaggcugaggugggaggauca

SEQ ID NO: 4939 - RNA, 21 nt, Artificial Sequence
  Description of Artificial Sequence: Synthetic oligonucleotide
uccucccaccucagccuccug

SEQ ID NO: 4940 - RNA, 21 nt, Artificial Sequence
  Description of Artificial Sequence: Synthetic oligonucleotide
ggaggcugaggugggaggauc

SEQ ID NO: 4941 - RNA, 21 nt, Artificial Sequence
  Description of Artificial Sequence: Synthetic oligonucleotide
ccucccaccucagccuccuga

SEQ ID NO: 4942 - RNA, 21 nt, Artificial Sequence
  Description of Artificial Sequence: Synthetic oligonucleotide
aggaggcugaggugggaggau

SEQ ID NO: 4943 - RNA, 21 nt, Artificial Sequence
  Description of Artificial Sequence: Synthetic oligonucleotide
cucccaccucagccuccugag

SEQ ID NO: 4944 - RNA, 21 nt, Artificial Sequence
  Description of Artificial Sequence: Synthetic oligonucleotide
caggaggcugaggugggagga

SEQ ID NO: 4945 - RNA, 21 nt, Artificial Sequence
  Description of Artificial Sequence: Synthetic oligonucleotide
ucccaccucagccuccugagu

SEQ ID NO: 4946 - RNA, 21 nt, Artificial Sequence
  Description of Artificial Sequence: Synthetic oligonucleotide
ucaggaggcugaggugggagg

SEQ ID NO: 4947 - RNA, 21 nt, Artificial Sequence
  Description of Artificial Sequence: Synthetic oligonucleotide
cccaccucagccuccugagua

SEQ ID NO: 4948 - RNA, 21 nt, Artificial Sequence
  Description of Artificial Sequence: Synthetic oligonucleotide
cucaggaggcugaggugggag

SEQ ID NO: 4949 - RNA, 21 nt, Artificial Sequence
  Description of Artificial Sequence: Synthetic oligonucleotide
ccaccucagccuccugaguag

SEQ ID NO: 4950 - RNA, 21 nt, Artificial Sequence
  Description of Artificial Sequence: Synthetic oligonucleotide
acucaggaggcugagguggga

SEQ ID NO: 4951 - RNA, 21 nt, Artificial Sequence
  Description of Artificial Sequence: Synthetic oligonucleotide
caccucagccuccugaguagc

SEQ ID NO: 4952 - RNA, 21 nt, Artificial Sequence
  Description of Artificial Sequence: Synthetic oligonucleotide
uacucaggaggcugagguggg

SEQ ID NO: 4953 - RNA, 21 nt, Artificial Sequence
  Description of Artificial Sequence: Synthetic oligonucleotide
accucagccuccugaguagcu

SEQ ID NO: 4954 - RNA, 21 nt, Artificial Sequence
  Description of Artificial Sequence: Synthetic oligonucleotide
cuacucaggaggcugaggugg

SEQ ID NO: 4955 - RNA, 21 nt, Artificial Sequence
  Description of Artificial Sequence: Synthetic oligonucleotide
ccucagccuccugaguagcug

SEQ ID NO: 4956 - RNA, 21 nt, Artificial Sequence
  Description of Artificial Sequence: Synthetic oligonucleotide
gcuacucaggaggcugaggug

SEQ ID NO: 4957 - RNA, 21 nt, Artificial Sequence
  Description of Artificial Sequence: Synthetic oligonucleotide
cucagccuccugaguagcugg

SEQ ID NO: 4958 - RNA, 21 nt, Artificial Sequence
  Description of Artificial Sequence: Synthetic oligonucleotide
agcuacucaggaggcugaggu

SEQ ID NO: 4959 - RNA, 21 nt, Artificial Sequence
  Description of Artificial Sequence: Synthetic oligonucleotide
ucagccuccugaguagcuggg

SEQ ID NO: 4960 - RNA, 21 nt, Artificial Sequence
  Description of Artificial Sequence: Synthetic oligonucleotide
cagcuacucaggaggcugagg

SEQ ID NO: 4961 - RNA, 21 nt, Artificial Sequence
  Description of Artificial Sequence: Synthetic oligonucleotide
cagccuccugaguagcuggga

SEQ ID NO: 4962 - RNA, 21 nt, Artificial Sequence
  Description of Artificial Sequence: Synthetic oligonucleotide
ccagcuacucaggaggcugag

SEQ ID NO: 4963 - RNA, 21 nt, Artificial Sequence
  Description of Artificial Sequence: Synthetic oligonucleotide
agccuccugaguagcugggac

SEQ ID NO: 4964 - RNA, 21 nt, Artificial Sequence
  Description of Artificial Sequence: Synthetic oligonucleotide
cccagcuacucaggaggcuga

SEQ ID NO: 4965 - RNA, 21 nt, Artificial Sequence
  Description of Artificial Sequence: Synthetic oligonucleotide
gccuccugaguagcugggacu

SEQ ID NO: 4966 - RNA, 21 nt, Artificial Sequence
  Description of Artificial Sequence: Synthetic oligonucleotide
ucccagcuacucaggaggcug

SEQ ID NO: 4967 - RNA, 21 nt, Artificial Sequence
  Description of Artificial Sequence: Synthetic oligonucleotide
ccuccugaguagcugggacua

SEQ ID NO: 4968 - RNA, 21 nt, Artificial Sequence
  Description of Artificial Sequence: Synthetic oligonucleotide
gucccagcuacucaggaggcu

SEQ ID NO: 4969 - RNA, 21 nt, Artificial Sequence
  Description of Artificial Sequence: Synthetic oligonucleotide
cuccugaguagcugggacuac

SEQ ID NO: 4970 - RNA, 21 nt, Artificial Sequence
  Description of Artificial Sequence: Synthetic oligonucleotide
agucccagcuacucaggaggc

SEQ ID NO: 4971 - RNA, 21 nt, Artificial Sequence
  Description of Artificial Sequence: Synthetic oligonucleotide
uccugaguagcugggacuaca

SEQ ID NO: 4972 - RNA, 21 nt, Artificial Sequence
  Description of Artificial Sequence: Synthetic oligonucleotide
uagucccagcuacucaggagg

SEQ ID NO: 4973 - RNA, 21 nt, Artificial Sequence
  Description of Artificial Sequence: Synthetic oligonucleotide
ccugaguagcugggacuacag

SEQ ID NO: 4974 - RNA, 21 nt, Artificial Sequence
  Description of Artificial Sequence: Synthetic oligonucleotide
guagucccagcuacucaggag

SEQ ID NO: 4975 - RNA, 21 nt, Artificial Sequence
  Description of Artificial Sequence: Synthetic oligonucleotide
cugaguagcugggacuacagg

SEQ ID NO: 4976 - RNA, 21 nt, Artificial Sequence
  Description of Artificial Sequence: Synthetic oligonucleotide
uguagucccagcuacucagga

SEQ ID NO: 4977 - RNA, 21 nt, Artificial Sequence
  Description of Artificial Sequence: Synthetic oligonucleotide
ugaguagcugggacuacaggc

SEQ ID NO: 4978 - RNA, 21 nt, Artificial Sequence
  Description of Artificial Sequence: Synthetic oligonucleotide
cuguagucccagcuacucagg

SEQ ID NO: 4979 - RNA, 21 nt, Artificial Sequence
  Description of Artificial Sequence: Synthetic oligonucleotide
gaguagcugggacuacaggcu

SEQ ID NO: 4980 - RNA, 21 nt, Artificial Sequence
  Description of Artificial Sequence: Synthetic oligonucleotide
ccuguagucccagcuacucag

SEQ ID NO: 4981 - RNA, 21 nt, Artificial Sequence
  Description of Artificial Sequence: Synthetic oligonucleotide
aguagcugggacuacaggcuc

SEQ ID NO: 4982 - RNA, 21 nt, Artificial Sequence
  Description of Artificial Sequence: Synthetic oligonucleotide
gccuguagucccagcuacuca

SEQ ID NO: 4983 - RNA, 21 nt, Artificial Sequence
  Description of Artificial Sequence: Synthetic oligonucleotide
guagcugggacuacaggcuca

SEQ ID NO: 4984 - RNA, 21 nt, Artificial Sequence
  Description of Artificial Sequence: Synthetic oligonucleotide
agccuguagucccagcuacuc

SEQ ID NO: 4985 - RNA, 21 nt, Artificial Sequence
  Description of Artificial Sequence: Synthetic oligonucleotide
uagcugggacuacaggcucau

SEQ ID NO: 4986 - RNA, 21 nt, Artificial Sequence
  Description of Artificial Sequence: Synthetic oligonucleotide
gagccuguagucccagcuacu

SEQ ID NO: 4987 - RNA, 21 nt, Artificial Sequence
  Description of Artificial Sequence: Synthetic oligonucleotide
agcugggacuacaggcucaug

SEQ ID NO: 4988 - RNA, 21 nt, Artificial Sequence
  Description of Artificial Sequence: Synthetic oligonucleotide
ugagccuguagucccagcuac

SEQ ID NO: 4989 - RNA, 21 nt, Artificial Sequence
  Description of Artificial Sequence: Synthetic oligonucleotide
gcugggacuacaggcucaugc

SEQ ID NO: 4990 - RNA, 21 nt, Artificial Sequence
  Description of Artificial Sequence: Synthetic oligonucleotide
augagccuguagucccagcua

SEQ ID NO: 4991 - RNA, 21 nt, Artificial Sequence
  Description of Artificial Sequence: Synthetic oligonucleotide
cugggacuacaggcucaugcc

SEQ ID NO: 4992 - RNA, 21 nt, Artificial Sequence
  Description of Artificial Sequence: Synthetic oligonucleotide
caugagccuguagucccagcu

SEQ ID NO: 4993 - RNA, 21 nt, Artificial Sequence
  Description of Artificial Sequence: Synthetic oligonucleotide
ugggacuacaggcucaugcca

SEQ ID NO: 4994 - RNA, 21 nt, Artificial Sequence
  Description of Artificial Sequence: Synthetic oligonucleotide
gcaugagccuguagucccagc

SEQ ID NO: 4995 - RNA, 21 nt, Artificial Sequence
  Description of Artificial Sequence: Synthetic oligonucleotide
gggacuacaggcucaugccau

SEQ ID NO: 4996 - RNA, 21 nt, Artificial Sequence
  Description of Artificial Sequence: Synthetic oligonucleotide
ggcaugagccuguagucccag

SEQ ID NO: 4997 - RNA, 21 nt, Artificial Sequence
  Description of Artificial Sequence: Synthetic oligonucleotide
ggacuacaggcucaugccauc

SEQ ID NO: 4998 - RNA, 21 nt, Artificial Sequence
  Description of Artificial Sequence: Synthetic oligonucleotide
uggcaugagccuguaguccca

SEQ ID NO: 4999 - RNA, 21 nt, Artificial Sequence
  Description of Artificial Sequence: Synthetic oligonucleotide
gacuacaggcucaugccauca

SEQ ID NO: 5000 - RNA, 21 nt, Artificial Sequence
  Description of Artificial Sequence: Synthetic oligonucleotide
auggcaugagccuguaguccc

SEQ ID NO: 5001 - RNA, 21 nt, Artificial Sequence
  Description of Artificial Sequence: Synthetic oligonucleotide
acuacaggcucaugccaucau

SEQ ID NO: 5002 - RNA, 21 nt, Artificial Sequence
  Description of Artificial Sequence: Synthetic oligonucleotide
gauggcaugagccuguagucc

SEQ ID NO: 5003 - RNA, 21 nt, Artificial Sequence
  Description of Artificial Sequence: Synthetic oligonucleotide
cuacaggcucaugccaucaug

SEQ ID NO: 5004 - RNA, 21 nt, Artificial Sequence
  Description of Artificial Sequence: Synthetic oligonucleotide
ugauggcaugagccuguaguc

SEQ ID NO: 5005 - RNA, 21 nt, Artificial Sequence
  Description of Artificial Sequence: Synthetic oligonucleotide
uacaggcucaugccaucaugc

SEQ ID NO: 5006 - RNA, 21 nt, Artificial Sequence
  Description of Artificial Sequence: Synthetic oligonucleotide
augauggcaugagccuguagu

SEQ ID NO: 5007 - RNA, 21 nt, Artificial Sequence
  Description of Artificial Sequence: Synthetic oligonucleotide
acaggcucaugccaucaugcc

SEQ ID NO: 5008 - RNA, 21 nt, Artificial Sequence
  Description of Artificial Sequence: Synthetic oligonucleotide
caugauggcaugagccuguag

SEQ ID NO: 5009 - RNA, 21 nt, Artificial Sequence
  Description of Artificial Sequence: Synthetic oligonucleotide
caggcucaugccaucaugccc

SEQ ID NO: 5010 - RNA, 21 nt, Artificial Sequence
  Description of Artificial Sequence: Synthetic oligonucleotide
gcaugauggcaugagccugua

SEQ ID NO: 5011 - RNA, 21 nt, Artificial Sequence
  Description of Artificial Sequence: Synthetic oligonucleotide
aggcucaugccaucaugccca

SEQ ID NO: 5012 - RNA, 21 nt, Artificial Sequence
  Description of Artificial Sequence: Synthetic oligonucleotide
ggcaugauggcaugagccugu

SEQ ID NO: 5013 - RNA, 21 nt, Artificial Sequence
  Description of Artificial Sequence: Synthetic oligonucleotide
ggcucaugccaucaugcccag

SEQ ID NO: 5014 - RNA, 21 nt, Artificial Sequence
  Description of Artificial Sequence: Synthetic oligonucleotide
gggcaugauggcaugagccug

SEQ ID NO: 5015 - RNA, 21 nt, Artificial Sequence
  Description of Artificial Sequence: Synthetic oligonucleotide
gcucaugccaucaugcccagc

SEQ ID NO: 5016 - RNA, 21 nt, Artificial Sequence
  Description of Artificial Sequence: Synthetic oligonucleotide
ugggcaugauggcaugagccu

SEQ ID NO: 5017 - RNA, 21 nt, Artificial Sequence
  Description of Artificial Sequence: Synthetic oligonucleotide
cucaugccaucaugcccagcu

SEQ ID NO: 5018 - RNA, 21 nt, Artificial Sequence
  Description of Artificial Sequence: Synthetic oligonucleotide
cugggcaugauggcaugagcc

SEQ ID NO: 5019 - RNA, 21 nt, Artificial Sequence
  Description of Artificial Sequence: Synthetic oligonucleotide
ucaugccaucaugcccagcua

SEQ ID NO: 5020 - RNA, 21 nt, Artificial Sequence
  Description of Artificial Sequence: Synthetic oligonucleotide
gcugggcaugauggcaugagc

SEQ ID NO: 5021 - RNA, 21 nt, Artificial Sequence
  Description of Artificial Sequence: Synthetic oligonucleotide
caugccaucaugcccagcuaa

SEQ ID NO: 5022 - RNA, 21 nt, Artificial Sequence
  Description of Artificial Sequence: Synthetic oligonucleotide
agcugggcaugauggcaugag

SEQ ID NO: 5023 - RNA, 21 nt, Artificial Sequence
  Description of Artificial Sequence: Synthetic oligonucleotide
augccaucaugcccagcuaau

SEQ ID NO: 5024 - RNA, 21 nt, Artificial Sequence
  Description of Artificial Sequence: Synthetic oligonucleotide
uagcugggcaugauggcauga

SEQ ID NO: 5025 - RNA, 21 nt, Artificial Sequence
  Description of Artificial Sequence: Synthetic oligonucleotide
ugccaucaugcccagcuaaua

SEQ ID NO: 5026 - RNA, 21 nt, Artificial Sequence
  Description of Artificial Sequence: Synthetic oligonucleotide
uuagcugggcaugauggcaug

SEQ ID NO: 5027 - RNA, 21 nt, Artificial Sequence
  Description of Artificial Sequence: Synthetic oligonucleotide
gccaucaugcccagcuaauau

SEQ ID NO: 5028 - RNA, 21 nt, Artificial Sequence
  Description of Artificial Sequence: Synthetic oligonucleotide
auuagcugggcaugauggcau

SEQ ID NO: 5029 - RNA, 21 nt, Artificial Sequence
  Description of Artificial Sequence: Synthetic oligonucleotide
ccaucaugcccagcuaauauu

SEQ ID NO: 5030 - RNA, 21 nt, Artificial Sequence
  Description of Artificial Sequence: Synthetic oligonucleotide
uauuagcugggcaugauggca

SEQ ID NO: 5031 - RNA, 21 nt, Artificial Sequence
  Description of Artificial Sequence: Synthetic oligonucleotide
caucaugcccagcuaauauuu

SEQ ID NO: 5032 - RNA, 21 nt, Artificial Sequence
  Description of Artificial Sequence: Synthetic oligonucleotide
auauuagcugggcaugauggc

SEQ ID NO: 5033 - RNA, 21 nt, Artificial Sequence
  Description of Artificial Sequence: Synthetic oligonucleotide
aucaugcccagcuaauauuuu

SEQ ID NO: 5034 - RNA, 21 nt, Artificial Sequence
  Description of Artificial Sequence: Synthetic oligonucleotide
aauauuagcugggcaugaugg

SEQ ID NO: 5035 - RNA, 21 nt, Artificial Sequence
  Description of Artificial Sequence: Synthetic oligonucleotide
ucaugcccagcuaauauuuuu

SEQ ID NO: 5036 - RNA, 21 nt, Artificial Sequence
  Description of Artificial Sequence: Synthetic oligonucleotide
aaauauuagcugggcaugaug

SEQ ID NO: 5037 - RNA, 21 nt, Artificial Sequence
  Description of Artificial Sequence: Synthetic oligonucleotide
caugcccagcuaauauuuuuu

SEQ ID NO: 5038 - RNA, 21 nt, Artificial Sequence
  Description of Artificial Sequence: Synthetic oligonucleotide
aaaauauuagcugggcaugau

SEQ ID NO: 5039 - RNA, 21 nt, Artificial Sequence
  Description of Artificial Sequence: Synthetic oligonucleotide
augcccagcuaauauuuuuuu

SEQ ID NO: 5040 - RNA, 21 nt, Artificial Sequence
  Description of Artificial Sequence: Synthetic oligonucleotide
aaaaauauuagcugggcauga

SEQ ID NO: 5041 - RNA, 21 nt, Artificial Sequence
  Description of Artificial Sequence: Synthetic oligonucleotide
ugcccagcuaauauuuuuuua

SEQ ID NO: 5042 - RNA, 21 nt, Artificial Sequence
  Description of Artificial Sequence: Synthetic oligonucleotide
aaaaaauauuagcugggcaug

SEQ ID NO: 5043 - RNA, 21 nt, Artificial Sequence
  Description of Artificial Sequence: Synthetic oligonucleotide
gcccagcuaauauuuuuuuau

SEQ ID NO: 5044 - RNA, 21 nt, Artificial Sequence
  Description of Artificial Sequence: Synthetic oligonucleotide
aaaaaaauauuagcugggcau

SEQ ID NO: 5045 - RNA, 21 nt, Artificial Sequence
  Description of Artificial Sequence: Synthetic oligonucleotide
cccagcuaauauuuuuuuauu

SEQ ID NO: 5046 - RNA, 21 nt, Artificial Sequence
  Description of Artificial Sequence: Synthetic oligonucleotide
uaaaaaaauauuagcugggca

SEQ ID NO: 5047 - RNA, 21 nt, Artificial Sequence
  Description of Artificial Sequence: Synthetic oligonucleotide
ccagcuaauauuuuuuuauuu

SEQ ID NO: 5048 - RNA, 21 nt, Artificial Sequence
  Description of Artificial Sequence: Synthetic oligonucleotide
auaaaaaaauauuagcugggc

SEQ ID NO: 5049 - RNA, 21 nt, Artificial Sequence
  Description of Artificial Sequence: Synthetic oligonucleotide
cagcuaauauuuuuuuauuuu

SEQ ID NO: 5050 - RNA, 21 nt, Artificial Sequence
  Description of Artificial Sequence: Synthetic oligonucleotide
aauaaaaaaauauuagcuggg

SEQ ID NO: 5051 - RNA, 21 nt, Artificial Sequence
  Description of Artificial Sequence: Synthetic oligonucleotide
agcuaauauuuuuuuauuuuc

SEQ ID NO: 5052 - RNA, 21 nt, Artificial Sequence
  Description of Artificial Sequence: Synthetic oligonucleotide
aaauaaaaaaauauuagcugg

SEQ ID NO: 5053 - RNA, 21 nt, Artificial Sequence
  Description of Artificial Sequence: Synthetic oligonucleotide
gcuaauauuuuuuuauuuucg

SEQ ID NO: 5054 - RNA, 21 nt, Artificial Sequence
  Description of Artificial Sequence: Synthetic oligonucleotide
aaaauaaaaaaauauuagcug

SEQ ID NO: 5055 - RNA, 21 nt, Artificial Sequence
  Description of Artificial Sequence: Synthetic oligonucleotide
cuaauauuuuuuuauuuucgu

SEQ ID NO: 5056 - RNA, 21 nt, Artificial Sequence
  Description of Artificial Sequence: Synthetic oligonucleotide
gaaaauaaaaaaauauuagcu

SEQ ID NO: 5057 - RNA, 21 nt, Artificial Sequence
  Description of Artificial Sequence: Synthetic oligonucleotide
uaauauuuuuuuauuuucgug

SEQ ID NO: 5058 - RNA, 21 nt, Artificial Sequence
  Description of Artificial Sequence: Synthetic oligonucleotide
cgaaaauaaaaaaauauuagc

SEQ ID NO: 5059 - RNA, 21 nt, Artificial Sequence
  Description of Artificial Sequence: Synthetic oligonucleotide
aauauuuuuuuauuuucgugg

SEQ ID NO: 5060 - RNA, 21 nt, Artificial Sequence
  Description of Artificial Sequence: Synthetic oligonucleotide
acgaaaauaaaaaaauauuag

SEQ ID NO: 5061 - RNA, 21 nt, Artificial Sequence
  Description of Artificial Sequence: Synthetic oligonucleotide
auauuuuuuuauuuucgugga

SEQ ID NO: 5062 - RNA, 21 nt, Artificial Sequence
  Description of Artificial Sequence: Synthetic oligonucleotide
cacgaaaauaaaaaaauauua

SEQ ID NO: 5063 - RNA, 21 nt, Artificial Sequence
  Description of Artificial Sequence: Synthetic oligonucleotide
uauuuuuuuauuuucguggag

SEQ ID NO: 5064 - RNA, 21 nt, Artificial Sequence
  Description of Artificial Sequence: Synthetic oligonucleotide
ccacgaaaauaaaaaaauauu

SEQ ID NO: 5065 - RNA, 21 nt, Artificial Sequence
  Description of Artificial Sequence: Synthetic oligonucleotide
auuuuuuuauuuucguggaga

SEQ ID NO: 5066 - RNA, 21 nt, Artificial Sequence
  Description of Artificial Sequence: Synthetic oligonucleotide
uccacgaaaauaaaaaaauau

SEQ ID NO: 5067 - RNA, 21 nt, Artificial Sequence
  Description of Artificial Sequence: Synthetic oligonucleotide
uuuuuuuauuuucguggagac

SEQ ID NO: 5068 - RNA, 21 nt, Artificial Sequence
  Description of Artificial Sequence: Synthetic oligonucleotide
cuccacgaaaauaaaaaaaua

SEQ ID NO: 5069 - RNA, 21 nt, Artificial Sequence
  Description of Artificial Sequence: Synthetic oligonucleotide
uuuuuuauuuucguggagacg

SEQ ID NO: 5070 - RNA, 21 nt, Artificial Sequence
  Description of Artificial Sequence: Synthetic oligonucleotide
ucuccacgaaaauaaaaaaau

SEQ ID NO: 5071 - RNA, 21 nt, Artificial Sequence
  Description of Artificial Sequence: Synthetic oligonucleotide
uuuuuauuuucguggagacgg

SEQ ID NO: 5072 - RNA, 21 nt, Artificial Sequence
  Description of Artificial Sequence: Synthetic oligonucleotide
gucuccacgaaaauaaaaaaa

SEQ ID NO: 5073 - RNA, 21 nt, Artificial Sequence
  Description of Artificial Sequence: Synthetic oligonucleotide
uuuuauuuucguggagacggg

SEQ ID NO: 5074 - RNA, 21 nt, Artificial Sequence
  Description of Artificial Sequence: Synthetic oligonucleotide
cgucuccacgaaaauaaaaaa

SEQ ID NO: 5075 - RNA, 21 nt, Artificial Sequence
  Description of Artificial Sequence: Synthetic oligonucleotide
uuuauuuucguggagacgggg

SEQ ID NO: 5076 - RNA, 21 nt, Artificial Sequence
  Description of Artificial Sequence: Synthetic oligonucleotide
ccgucuccacgaaaauaaaaa

SEQ ID NO: 5077 - RNA, 21 nt, Artificial Sequence
  Description of Artificial Sequence: Synthetic oligonucleotide
uuauuuucguggagacggggc

SEQ ID NO: 5078 - RNA, 21 nt, Artificial Sequence
  Description of Artificial Sequence: Synthetic oligonucleotide
cccgucuccacgaaaauaaaa

SEQ ID NO: 5079 - RNA, 21 nt, Artificial Sequence
  Description of Artificial Sequence: Synthetic oligonucleotide
uauuuucguggagacggggcc

SEQ ID NO: 5080 - RNA, 21 nt, Artificial Sequence
  Description of Artificial Sequence: Synthetic oligonucleotide
ccccgucuccacgaaaauaaa

SEQ ID NO: 5081 - RNA, 21 nt, Artificial Sequence
  Description of Artificial Sequence: Synthetic oligonucleotide
auuuucguggagacggggccu

SEQ ID NO: 5082 - RNA, 21 nt, Artificial Sequence
  Description of Artificial Sequence: Synthetic oligonucleotide
gccccgucuccacgaaaauaa

SEQ ID NO: 5083 - RNA, 21 nt, Artificial Sequence
  Description of Artificial Sequence: Synthetic oligonucleotide
uuuucguggagacggggccuc

SEQ ID NO: 5084 - RNA, 21 nt, Artificial Sequence
  Description of Artificial Sequence: Synthetic oligonucleotide
ggccccgucuccacgaaaaua

SEQ ID NO: 5085 - RNA, 21 nt, Artificial Sequence
  Description of Artificial Sequence: Synthetic oligonucleotide
uuucguggagacggggccuca

SEQ ID NO: 5086 - RNA, 21 nt, Artificial Sequence
  Description of Artificial Sequence: Synthetic oligonucleotide
aggccccgucuccacgaaaau

SEQ ID NO: 5087 - RNA, 21 nt, Artificial Sequence
  Description of Artificial Sequence: Synthetic oligonucleotide
uucguggagacggggccucac

SEQ ID NO: 5088 - RNA, 21 nt, Artificial Sequence
  Description of Artificial Sequence: Synthetic oligonucleotide
gaggccccgucuccacgaaaa

SEQ ID NO: 5089 - RNA, 21 nt, Artificial Sequence
  Description of Artificial Sequence: Synthetic oligonucleotide
ucguggagacggggccucacu

SEQ ID NO: 5090 - RNA, 21 nt, Artificial Sequence
  Description of Artificial Sequence: Synthetic oligonucleotide
ugaggccccgucuccacgaaa

SEQ ID NO: 5091 - RNA, 21 nt, Artificial Sequence
  Description of Artificial Sequence: Synthetic oligonucleotide
cguggagacggggccucacua

SEQ ID NO: 5092 - RNA, 21 nt, Artificial Sequence
  Description of Artificial Sequence: Synthetic oligonucleotide
gugaggccccgucuccacgaa

SEQ ID NO: 5093 - RNA, 21 nt, Artificial Sequence
  Description of Artificial Sequence: Synthetic oligonucleotide
guggagacggggccucacuau

SEQ ID NO: 5094 - RNA, 21 nt, Artificial Sequence
  Description of Artificial Sequence: Synthetic oligonucleotide
agugaggccccgucuccacga

SEQ ID NO: 5095 - RNA, 21 nt, Artificial Sequence
  Description of Artificial Sequence: Synthetic oligonucleotide
uggagacggggccucacuaug

SEQ ID NO: 5096 - RNA, 21 nt, Artificial Sequence
  Description of Artificial Sequence: Synthetic oligonucleotide
uagugaggccccgucuccacg

SEQ ID NO: 5097 - RNA, 21 nt, Artificial Sequence
  Description of Artificial Sequence: Synthetic oligonucleotide
ggagacggggccucacuaugu

SEQ ID NO: 5098 - RNA, 21 nt, Artificial Sequence
  Description of Artificial Sequence: Synthetic oligonucleotide
auagugaggccccgucuccac

SEQ ID NO: 5099 - RNA, 21 nt, Artificial Sequence
  Description of Artificial Sequence: Synthetic oligonucleotide
gagacggggccucacuauguu

SEQ ID NO: 5100 - RNA, 21 nt, Artificial Sequence
  Description of Artificial Sequence: Synthetic oligonucleotide
cauagugaggccccgucucca

SEQ ID NO: 5101 - RNA, 21 nt, Artificial Sequence
  Description of Artificial Sequence: Synthetic oligonucleotide
agacggggccucacuauguug

SEQ ID NO: 5102 - RNA, 21 nt, Artificial Sequence
  Description of Artificial Sequence: Synthetic oligonucleotide
acauagugaggccccgucucc

SEQ ID NO: 5103 - RNA, 21 nt, Artificial Sequence
  Description of Artificial Sequence: Synthetic oligonucleotide
gacggggccucacuauguugc

SEQ ID NO: 5104 - RNA, 21 nt, Artificial Sequence
  Description of Artificial Sequence: Synthetic oligonucleotide
aacauagugaggccccgucuc

SEQ ID NO: 5105 - RNA, 21 nt, Artificial Sequence
  Description of Artificial Sequence: Synthetic oligonucleotide
acggggccucacuauguugcc

SEQ ID NO: 5106 - RNA, 21 nt, Artificial Sequence
  Description of Artificial Sequence: Synthetic oligonucleotide
caacauagugaggccccgucu

SEQ ID NO: 5107 - RNA, 21 nt, Artificial Sequence
  Description of Artificial Sequence: Synthetic oligonucleotide
cggggccucacuauguugccu

SEQ ID NO: 5108 - RNA, 21 nt, Artificial Sequence
  Description of Artificial Sequence: Synthetic oligonucleotide
gcaacauagugaggccccguc

SEQ ID NO: 5109 - RNA, 21 nt, Artificial Sequence
  Description of Artificial Sequence: Synthetic oligonucleotide
ggggccucacuauguugccua

SEQ ID NO: 5110 - RNA, 21 nt, Artificial Sequence
  Description of Artificial Sequence: Synthetic oligonucleotide
ggcaacauagugaggccccgu

SEQ ID NO: 5111 - RNA, 21 nt, Artificial Sequence
  Description of Artificial Sequence: Synthetic oligonucleotide
gggccucacuauguugccuag

SEQ ID NO: 5112 - RNA, 21 nt, Artificial Sequence
  Description of Artificial Sequence: Synthetic oligonucleotide
aggcaacauagugaggccccg

SEQ ID NO: 5113 - RNA, 21 nt, Artificial Sequence
  Description of Artificial Sequence: Synthetic oligonucleotide
ggccucacuauguugccuagg

SEQ ID NO: 5114 - RNA, 21 nt, Artificial Sequence
  Description of Artificial Sequence: Synthetic oligonucleotide
uaggcaacauagugaggcccc

SEQ ID NO: 5115 - RNA, 21 nt, Artificial Sequence
  Description of Artificial Sequence: Synthetic oligonucleotide
gccucacuauguugccuaggc

SEQ ID NO: 5116 - RNA, 21 nt, Artificial Sequence
  Description of Artificial Sequence: Synthetic oligonucleotide
cuaggcaacauagugaggccc

SEQ ID NO: 5117 - RNA, 21 nt, Artificial Sequence
  Description of Artificial Sequence: Synthetic oligonucleotide
ccucacuauguugccuaggcu

SEQ ID NO: 5118 - RNA, 21 nt, Artificial Sequence
  Description of Artificial Sequence: Synthetic oligonucleotide
ccuaggcaacauagugaggcc

SEQ ID NO: 5119 - RNA, 21 nt, Artificial Sequence
  Description of Artificial Sequence: Synthetic oligonucleotide
cucacuauguugccuaggcug

SEQ ID NO: 5120 - RNA, 21 nt, Artificial Sequence
  Description of Artificial Sequence: Synthetic oligonucleotide
gccuaggcaacauagugaggc

SEQ ID NO: 5121 - RNA, 21 nt, Artificial Sequence
  Description of Artificial Sequence: Synthetic oligonucleotide
ucacuauguugccuaggcugg

SEQ ID NO: 5122 - RNA, 21 nt, Artificial Sequence
  Description of Artificial Sequence: Synthetic oligonucleotide
agccuaggcaacauagugagg

SEQ ID NO: 5123 - RNA, 21 nt, Artificial Sequence
  Description of Artificial Sequence: Synthetic oligonucleotide
cacuauguugccuaggcugga

SEQ ID NO: 5124 - RNA, 21 nt, Artificial Sequence
  Description of Artificial Sequence: Synthetic oligonucleotide
cagccuaggcaacauagugag

SEQ ID NO: 5125 - RNA, 21 nt, Artificial Sequence
  Description of Artificial Sequence: Synthetic oligonucleotide
acuauguugccuaggcuggaa

SEQ ID NO: 5126 - RNA, 21 nt, Artificial Sequence
  Description of Artificial Sequence: Synthetic oligonucleotide
ccagccuaggcaacauaguga

SEQ ID NO: 5127 - RNA, 21 nt, Artificial Sequence
  Description of Artificial Sequence: Synthetic oligonucleotide
cuauguugccuaggcuggaaa

SEQ ID NO: 5128 - RNA, 21 nt, Artificial Sequence
  Description of Artificial Sequence: Synthetic oligonucleotide
uccagccuaggcaacauagug

SEQ ID NO: 5129 - RNA, 21 nt, Artificial Sequence
  Description of Artificial Sequence: Synthetic oligonucleotide
uauguugccuaggcuggaaau

SEQ ID NO: 5130 - RNA, 21 nt, Artificial Sequence
  Description of Artificial Sequence: Synthetic oligonucleotide
uuccagccuaggcaacauagu

SEQ ID NO: 5131 - RNA, 21 nt, Artificial Sequence
  Description of Artificial Sequence: Synthetic oligonucleotide
auguugccuaggcuggaaaua

SEQ ID NO: 5132 - RNA, 21 nt, Artificial Sequence
  Description of Artificial Sequence: Synthetic oligonucleotide
uuuccagccuaggcaacauag

SEQ ID NO: 5133 - RNA, 21 nt, Artificial Sequence
  Description of Artificial Sequence: Synthetic oligonucleotide
uguugccuaggcuggaaauag

SEQ ID NO: 5134 - RNA, 21 nt, Artificial Sequence
  Description of Artificial Sequence: Synthetic oligonucleotide
auuuccagccuaggcaacaua

SEQ ID NO: 5135 - RNA, 21 nt, Artificial Sequence
  Description of Artificial Sequence: Synthetic oligonucleotide
guugccuaggcuggaaauagg

SEQ ID NO: 5136 - RNA, 21 nt, Artificial Sequence
  Description of Artificial Sequence: Synthetic oligonucleotide
uauuuccagccuaggcaacau

SEQ ID NO: 5137 - RNA, 21 nt, Artificial Sequence
  Description of Artificial Sequence: Synthetic oligonucleotide
uugccuaggcuggaaauagga

SEQ ID NO: 5138 - RNA, 21 nt, Artificial Sequence
  Description of Artificial Sequence: Synthetic oligonucleotide
cuauuuccagccuaggcaaca

SEQ ID NO: 5139 - RNA, 21 nt, Artificial Sequence
  Description of Artificial Sequence: Synthetic oligonucleotide
ugccuaggcuggaaauaggau

SEQ ID NO: 5140 - RNA, 21 nt, Artificial Sequence
  Description of Artificial Sequence: Synthetic oligonucleotide
ccuauuuccagccuaggcaac

SEQ ID NO: 5141 - RNA, 21 nt, Artificial Sequence
  Description of Artificial Sequence: Synthetic oligonucleotide
gccuaggcuggaaauaggauu

SEQ ID NO: 5142 - RNA, 21 nt, Artificial Sequence
  Description of Artificial Sequence: Synthetic oligonucleotide
uccuauuuccagccuaggcaa

SEQ ID NO: 5143 - RNA, 21 nt, Artificial Sequence
  Description of Artificial Sequence: Synthetic oligonucleotide
ccuaggcuggaaauaggauuu

SEQ ID NO: 5144 - RNA, 21 nt, Artificial Sequence
  Description of Artificial Sequence: Synthetic oligonucleotide
auccuauuuccagccuaggca

SEQ ID NO: 5145 - RNA, 21 nt, Artificial Sequence
  Description of Artificial Sequence: Synthetic oligonucleotide
cuaggcuggaaauaggauuuu

SEQ ID NO: 5146 - RNA, 21 nt, Artificial Sequence
  Description of Artificial Sequence: Synthetic oligonucleotide
aauccuauuuccagccuaggc

SEQ ID NO: 5147 - RNA, 21 nt, Artificial Sequence
  Description of Artificial Sequence: Synthetic oligonucleotide
uaggcuggaaauaggauuuug

SEQ ID NO: 5148 - RNA, 21 nt, Artificial Sequence
  Description of Artificial Sequence: Synthetic oligonucleotide
aaauccuauuuccagccuagg

SEQ ID NO: 5149 - RNA, 21 nt, Artificial Sequence
  Description of Artificial Sequence: Synthetic oligonucleotide
aggcuggaaauaggauuuuga

SEQ ID NO: 5150 - RNA, 21 nt, Artificial Sequence
  Description of Artificial Sequence: Synthetic oligonucleotide
aaaauccuauuuccagccuag

SEQ ID NO: 5151 - RNA, 21 nt, Artificial Sequence
  Description of Artificial Sequence: Synthetic oligonucleotide
ggcuggaaauaggauuuugaa

SEQ ID NO: 5152 - RNA, 21 nt, Artificial Sequence
  Description of Artificial Sequence: Synthetic oligonucleotide
caaaauccuauuuccagccua

SEQ ID NO: 5153 - RNA, 21 nt, Artificial Sequence
  Description of Artificial Sequence: Synthetic oligonucleotide
gcuggaaauaggauuuugaac

SEQ ID NO: 5154 - RNA, 21 nt, Artificial Sequence
  Description of Artificial Sequence: Synthetic oligonucleotide
ucaaaauccuauuuccagccu

SEQ ID NO: 5155 - RNA, 21 nt, Artificial Sequence
  Description of Artificial Sequence: Synthetic oligonucleotide
cuggaaauaggauuuugaacc

SEQ ID NO: 5156 - RNA, 21 nt, Artificial Sequence
  Description of Artificial Sequence: Synthetic oligonucleotide
uucaaaauccuauuuccagcc

SEQ ID NO: 5157 - RNA, 21 nt, Artificial Sequence
  Description of Artificial Sequence: Synthetic oligonucleotide
uggaaauaggauuuugaaccc

SEQ ID NO: 5158 - RNA, 21 nt, Artificial Sequence
  Description of Artificial Sequence: Synthetic oligonucleotide
guucaaaauccuauuuccagc

SEQ ID NO: 5159 - RNA, 21 nt, Artificial Sequence
  Description of Artificial Sequence: Synthetic oligonucleotide
ggaaauaggauuuugaaccca

SEQ ID NO: 5160 - RNA, 21 nt, Artificial Sequence
  Description of Artificial Sequence: Synthetic oligonucleotide
gguucaaaauccuauuuccag

SEQ ID NO: 5161 - RNA, 21 nt, Artificial Sequence
  Description of Artificial Sequence: Synthetic oligonucleotide
gaaauaggauuuugaacccaa

SEQ ID NO: 5162 - RNA, 21 nt, Artificial Sequence
  Description of Artificial Sequence: Synthetic oligonucleotide
ggguucaaaauccuauuucca

SEQ ID NO: 5163 - RNA, 21 nt, Artificial Sequence
  Description of Artificial Sequence: Synthetic oligonucleotide
aaauaggauuuugaacccaaa

SEQ ID NO: 5164 - RNA, 21 nt, Artificial Sequence
  Description of Artificial Sequence: Synthetic oligonucleotide
uggguucaaaauccuauuucc

SEQ ID NO: 5165 - RNA, 21 nt, Artificial Sequence
  Description of Artificial Sequence: Synthetic oligonucleotide
aauaggauuuugaacccaaau

SEQ ID NO: 5166 - RNA, 21 nt, Artificial Sequence
  Description of Artificial Sequence: Synthetic oligonucleotide
uuggguucaaaauccuauuuc

SEQ ID NO: 5167 - RNA, 21 nt, Artificial Sequence
  Description of Artificial Sequence: Synthetic oligonucleotide
auaggauuuugaacccaaauu

SEQ ID NO: 5168 - RNA, 21 nt, Artificial Sequence
  Description of Artificial Sequence: Synthetic oligonucleotide
uuuggguucaaaauccuauuu

SEQ ID NO: 5169 - RNA, 21 nt, Artificial Sequence
  Description of Artificial Sequence: Synthetic oligonucleotide
uaggauuuugaacccaaauug

SEQ ID NO: 5170 - RNA, 21 nt, Artificial Sequence
  Description of Artificial Sequence: Synthetic oligonucleotide
auuuggguucaaaauccuauu

SEQ ID NO: 5171 - RNA, 21 nt, Artificial Sequence
  Description of Artificial Sequence: Synthetic oligonucleotide
aggauuuugaacccaaauuga

SEQ ID NO: 5172 - RNA, 21 nt, Artificial Sequence
  Description of Artificial Sequence: Synthetic oligonucleotide
aauuuggguucaaaauccuau

SEQ ID NO: 5173 - RNA, 21 nt, Artificial Sequence
  Description of Artificial Sequence: Synthetic oligonucleotide
ggauuuugaacccaaauugag

SEQ ID NO: 5174 - RNA, 21 nt, Artificial Sequence
  Description of Artificial Sequence: Synthetic oligonucleotide
caauuuggguucaaaauccua

SEQ ID NO: 5175 - RNA, 21 nt, Artificial Sequence
  Description of Artificial Sequence: Synthetic oligonucleotide
gauuuugaacccaaauugagu

SEQ ID NO: 5176 - RNA, 21 nt, Artificial Sequence
  Description of Artificial Sequence: Synthetic oligonucleotide
ucaauuuggguucaaaauccu

SEQ ID NO: 5177 - RNA, 21 nt, Artificial Sequence
  Description of Artificial Sequence: Synthetic oligonucleotide
auuuugaacccaaauugaguu

SEQ ID NO: 5178 - RNA, 21 nt, Artificial Sequence
  Description of Artificial Sequence: Synthetic oligonucleotide
cucaauuuggguucaaaaucc

SEQ ID NO: 5179 - RNA, 21 nt, Artificial Sequence
  Description of Artificial Sequence: Synthetic oligonucleotide
uuuugaacccaaauugaguuu

SEQ ID NO: 5180 - RNA, 21 nt, Artificial Sequence
  Description of Artificial Sequence: Synthetic oligonucleotide
acucaauuuggguucaaaauc

SEQ ID NO: 5181 - RNA, 21 nt, Artificial Sequence
  Description of Artificial Sequence: Synthetic oligonucleotide
uuugaacccaaauugaguuua

SEQ ID NO: 5182 - RNA, 21 nt, Artificial Sequence
  Description of Artificial Sequence: Synthetic oligonucleotide
aacucaauuuggguucaaaau

SEQ ID NO: 5183 - RNA, 21 nt, Artificial Sequence
  Description of Artificial Sequence: Synthetic oligonucleotide
uugaacccaaauugaguuuaa

SEQ ID NO: 5184 - RNA, 21 nt, Artificial Sequence
  Description of Artificial Sequence: Synthetic oligonucleotide
aaacucaauuuggguucaaaa

SEQ ID NO: 5185 - RNA, 21 nt, Artificial Sequence
  Description of Artificial Sequence: Synthetic oligonucleotide
ugaacccaaauugaguuuaac

SEQ ID NO: 5186 - RNA, 21 nt, Artificial Sequence
  Description of Artificial Sequence: Synthetic oligonucleotide
uaaacucaauuuggguucaaa

SEQ ID NO: 5187 - RNA, 21 nt, Artificial Sequence
  Description of Artificial Sequence: Synthetic oligonucleotide
gaacccaaauugaguuuaaca

SEQ ID NO: 5188 - RNA, 21 nt, Artificial Sequence
  Description of Artificial Sequence: Synthetic oligonucleotide
uuaaacucaauuuggguucaa

SEQ ID NO: 5189 - RNA, 21 nt, Artificial Sequence
  Description of Artificial Sequence: Synthetic oligonucleotide
aacccaaauugaguuuaacaa

SEQ ID NO: 5190 - RNA, 21 nt, Artificial Sequence
  Description of Artificial Sequence: Synthetic oligonucleotide
guuaaacucaauuuggguuca

SEQ ID NO: 5191 - RNA, 21 nt, Artificial Sequence
  Description of Artificial Sequence: Synthetic oligonucleotide
acccaaauugaguuuaacaau

SEQ ID NO: 5192 - RNA, 21 nt, Artificial Sequence
  Description of Artificial Sequence: Synthetic oligonucleotide
uguuaaacucaauuuggguuc

SEQ ID NO: 5193 - RNA, 21 nt, Artificial Sequence
  Description of Artificial Sequence: Synthetic oligonucleotide
cccaaauugaguuuaacaaua

SEQ ID NO: 5194 - RNA, 21 nt, Artificial Sequence
  Description of Artificial Sequence: Synthetic oligonucleotide
uuguuaaacucaauuuggguu

SEQ ID NO: 5195 - RNA, 21 nt, Artificial Sequence
  Description of Artificial Sequence: Synthetic oligonucleotide
ccaaauugaguuuaacaauaa

SEQ ID NO: 5196 - RNA, 21 nt, Artificial Sequence
  Description of Artificial Sequence: Synthetic oligonucleotide
auuguuaaacucaauuugggu

SEQ ID NO: 5197 - RNA, 21 nt, Artificial Sequence
  Description of Artificial Sequence: Synthetic oligonucleotide
caaauugaguuuaacaauaau

SEQ ID NO: 5198 - RNA, 21 nt, Artificial Sequence
  Description of Artificial Sequence: Synthetic oligonucleotide
uauuguuaaacucaauuuggg

SEQ ID NO: 5199 - RNA, 21 nt, Artificial Sequence
  Description of Artificial Sequence: Synthetic oligonucleotide
aaauugaguuuaacaauaaua

SEQ ID NO: 5200 - RNA, 21 nt, Artificial Sequence
  Description of Artificial Sequence: Synthetic oligonucleotide
uuauuguuaaacucaauuugg

SEQ ID NO: 5201 - RNA, 21 nt, Artificial Sequence
  Description of Artificial Sequence: Synthetic oligonucleotide
aauugaguuuaacaauaauaa

SEQ ID NO: 5202 - RNA, 21 nt, Artificial Sequence
  Description of Artificial Sequence: Synthetic oligonucleotide
auuauuguuaaacucaauuug

SEQ ID NO: 5203 - RNA, 21 nt, Artificial Sequence
  Description of Artificial Sequence: Synthetic oligonucleotide
auugaguuuaacaauaauaaa

SEQ ID NO: 5204 - RNA, 21 nt, Artificial Sequence
  Description of Artificial Sequence: Synthetic oligonucleotide
uauuauuguuaaacucaauuu

SEQ ID NO: 5205 - RNA, 21 nt, Artificial Sequence
  Description of Artificial Sequence: Synthetic oligonucleotide
uugaguuuaacaauaauaaaa

SEQ ID NO: 5206 - RNA, 21 nt, Artificial Sequence
  Description of Artificial Sequence: Synthetic oligonucleotide
uuauuauuguuaaacucaauu

SEQ ID NO: 5207 - RNA, 21 nt, Artificial Sequence
  Description of Artificial Sequence: Synthetic oligonucleotide
ugaguuuaacaauaauaaaaa

SEQ ID NO: 5208 - RNA, 21 nt, Artificial Sequence
  Description of Artificial Sequence: Synthetic oligonucleotide
uuuauuauuguuaaacucaau

SEQ ID NO: 5209 - RNA, 21 nt, Artificial Sequence
  Description of Artificial Sequence: Synthetic oligonucleotide
gaguuuaacaauaauaaaaag

SEQ ID NO: 5210 - RNA, 21 nt, Artificial Sequence
  Description of Artificial Sequence: Synthetic oligonucleotide
uuuuauuauuguuaaacucaa

SEQ ID NO: 5211 - RNA, 21 nt, Artificial Sequence
  Description of Artificial Sequence: Synthetic oligonucleotide
aguuuaacaauaauaaaaagu

SEQ ID NO: 5212 - RNA, 21 nt, Artificial Sequence
  Description of Artificial Sequence: Synthetic oligonucleotide
uuuuuauuauuguuaaacuca

SEQ ID NO: 5213 - RNA, 21 nt, Artificial Sequence
  Description of Artificial Sequence: Synthetic oligonucleotide
guuuaacaauaauaaaaaguu

SEQ ID NO: 5214 - RNA, 21 nt, Artificial Sequence
  Description of Artificial Sequence: Synthetic oligonucleotide
cuuuuuauuauuguuaaacuc

SEQ ID NO: 5215 - RNA, 21 nt, Artificial Sequence
  Description of Artificial Sequence: Synthetic oligonucleotide
uuuaacaauaauaaaaaguug

SEQ ID NO: 5216 - RNA, 21 nt, Artificial Sequence
  Description of Artificial Sequence: Synthetic oligonucleotide
acuuuuuauuauuguuaaacu

SEQ ID NO: 5217 - RNA, 21 nt, Artificial Sequence
  Description of Artificial Sequence: Synthetic oligonucleotide
uuaacaauaauaaaaaguugu

SEQ ID NO: 5218 - RNA, 21 nt, Artificial Sequence
  Description of Artificial Sequence: Synthetic oligonucleotide
aacuuuuuauuauuguuaaac

SEQ ID NO: 5219 - RNA, 21 nt, Artificial Sequence
  Description of Artificial Sequence: Synthetic oligonucleotide
uaacaauaauaaaaaguuguu

SEQ ID NO: 5220 - RNA, 21 nt, Artificial Sequence
  Description of Artificial Sequence: Synthetic oligonucleotide
caacuuuuuauuauuguuaaa

SEQ ID NO: 5221 - RNA, 21 nt, Artificial Sequence
  Description of Artificial Sequence: Synthetic oligonucleotide
aacaauaauaaaaaguuguuu

SEQ ID NO: 5222 - RNA, 21 nt, Artificial Sequence
  Description of Artificial Sequence: Synthetic oligonucleotide
acaacuuuuuauuauuguuaa

SEQ ID NO: 5223 - RNA, 21 nt, Artificial Sequence
  Description of Artificial Sequence: Synthetic oligonucleotide
acaauaauaaaaaguuguuuu

SEQ ID NO: 5224 - RNA, 21 nt, Artificial Sequence
  Description of Artificial Sequence: Synthetic oligonucleotide
aacaacuuuuuauuauuguua

SEQ ID NO: 5225 - RNA, 21 nt, Artificial Sequence
  Description of Artificial Sequence: Synthetic oligonucleotide
caauaauaaaaaguuguuuua

SEQ ID NO: 5226 - RNA, 21 nt, Artificial Sequence
  Description of Artificial Sequence: Synthetic oligonucleotide
aaacaacuuuuuauuauuguu

SEQ ID NO: 5227 - RNA, 21 nt, Artificial Sequence
  Description of Artificial Sequence: Synthetic oligonucleotide
aauaauaaaaaguuguuuuac

SEQ ID NO: 5228 - RNA, 21 nt, Artificial Sequence
  Description of Artificial Sequence: Synthetic oligonucleotide
aaaacaacuuuuuauuauugu

SEQ ID NO: 5229 - RNA, 21 nt, Artificial Sequence
  Description of Artificial Sequence: Synthetic oligonucleotide
auaauaaaaaguuguuuuacg

SEQ ID NO: 5230 - RNA, 21 nt, Artificial Sequence
  Description of Artificial Sequence: Synthetic oligonucleotide
uaaaacaacuuuuuauuauug

SEQ ID NO: 5231 - RNA, 21 nt, Artificial Sequence
  Description of Artificial Sequence: Synthetic oligonucleotide
uaauaaaaaguuguuuuacgc

SEQ ID NO: 5232 - RNA, 21 nt, Artificial Sequence
  Description of Artificial Sequence: Synthetic oligonucleotide
guaaaacaacuuuuuauuauu

SEQ ID NO: 5233 - RNA, 21 nt, Artificial Sequence
  Description of Artificial Sequence: Synthetic oligonucleotide
aauaaaaaguuguuuuacgcu

SEQ ID NO: 5234 - RNA, 21 nt, Artificial Sequence
  Description of Artificial Sequence: Synthetic oligonucleotide
cguaaaacaacuuuuuauuau

SEQ ID NO: 5235 - RNA, 21 nt, Artificial Sequence
  Description of Artificial Sequence: Synthetic oligonucleotide
auaaaaaguuguuuuacgcua

SEQ ID NO: 5236 - RNA, 21 nt, Artificial Sequence
  Description of Artificial Sequence: Synthetic oligonucleotide
gcguaaaacaacuuuuuauua

SEQ ID NO: 5237 - RNA, 21 nt, Artificial Sequence
  Description of Artificial Sequence: Synthetic oligonucleotide
uaaaaaguuguuuuacgcuaa

SEQ ID NO: 5238 - RNA, 21 nt, Artificial Sequence
  Description of Artificial Sequence: Synthetic oligonucleotide
agcguaaaacaacuuuuuauu

SEQ ID NO: 5239 - RNA, 21 nt, Artificial Sequence
  Description of Artificial Sequence: Synthetic oligonucleotide
aaaaaguuguuuuacgcuaaa

SEQ ID NO: 5240 - RNA, 21 nt, Artificial Sequence
  Description of Artificial Sequence: Synthetic oligonucleotide
uagcguaaaacaacuuuuuau

SEQ ID NO: 5241 - RNA, 21 nt, Artificial Sequence
  Description of Artificial Sequence: Synthetic oligonucleotide
aaaaguuguuuuacgcuaaag

SEQ ID NO: 5242 - RNA, 21 nt, Artificial Sequence
  Description of Artificial Sequence: Synthetic oligonucleotide
uuagcguaaaacaacuuuuua

SEQ ID NO: 5243 - RNA, 21 nt, Artificial Sequence
  Description of Artificial Sequence: Synthetic oligonucleotide
aaaguuguuuuacgcuaaaga

SEQ ID NO: 5244 - RNA, 21 nt, Artificial Sequence
  Description of Artificial Sequence: Synthetic oligonucleotide
uuuagcguaaaacaacuuuuu

SEQ ID NO: 5245 - RNA, 21 nt, Artificial Sequence
  Description of Artificial Sequence: Synthetic oligonucleotide
aaguuguuuuacgcuaaagau

SEQ ID NO: 5246 - RNA, 21 nt, Artificial Sequence
  Description of Artificial Sequence: Synthetic oligonucleotide
cuuuagcguaaaacaacuuuu

SEQ ID NO: 5247 - RNA, 21 nt, Artificial Sequence
  Description of Artificial Sequence: Synthetic oligonucleotide
aguuguuuuacgcuaaagaug

SEQ ID NO: 5248 - RNA, 21 nt, Artificial Sequence
  Description of Artificial Sequence: Synthetic oligonucleotide
ucuuuagcguaaaacaacuuu

SEQ ID NO: 5249 - RNA, 21 nt, Artificial Sequence
  Description of Artificial Sequence: Synthetic oligonucleotide
guuguuuuacgcuaaagaugg

SEQ ID NO: 5250 - RNA, 21 nt, Artificial Sequence
  Description of Artificial Sequence: Synthetic oligonucleotide
aucuuuagcguaaaacaacuu

SEQ ID NO: 5251 - RNA, 21 nt, Artificial Sequence
  Description of Artificial Sequence: Synthetic oligonucleotide
uuguuuuacgcuaaagaugga

SEQ ID NO: 5252 - RNA, 21 nt, Artificial Sequence
  Description of Artificial Sequence: Synthetic oligonucleotide
caucuuuagcguaaaacaacu

SEQ ID NO: 5253 - RNA, 21 nt, Artificial Sequence
  Description of Artificial Sequence: Synthetic oligonucleotide
uguuuuacgcuaaagauggaa

SEQ ID NO: 5254 - RNA, 21 nt, Artificial Sequence
  Description of Artificial Sequence: Synthetic oligonucleotide
ccaucuuuagcguaaaacaac

SEQ ID NO: 5255 - RNA, 21 nt, Artificial Sequence
  Description of Artificial Sequence: Synthetic oligonucleotide
guuuuacgcuaaagauggaaa

SEQ ID NO: 5256 - RNA, 21 nt, Artificial Sequence
  Description of Artificial Sequence: Synthetic oligonucleotide
uccaucuuuagcguaaaacaa

SEQ ID NO: 5257 - RNA, 21 nt, Artificial Sequence
  Description of Artificial Sequence: Synthetic oligonucleotide
uuuuacgcuaaagauggaaaa

SEQ ID NO: 5258 - RNA, 21 nt, Artificial Sequence
  Description of Artificial Sequence: Synthetic oligonucleotide
uuccaucuuuagcguaaaaca

SEQ ID NO: 5259 - RNA, 21 nt, Artificial Sequence
  Description of Artificial Sequence: Synthetic oligonucleotide
uuuacgcuaaagauggaaaag

SEQ ID NO: 5260 - RNA, 21 nt, Artificial Sequence
  Description of Artificial Sequence: Synthetic oligonucleotide
uuuccaucuuuagcguaaaac

SEQ ID NO: 5261 - RNA, 21 nt, Artificial Sequence
  Description of Artificial Sequence: Synthetic oligonucleotide
uuacgcuaaagauggaaaaga

SEQ ID NO: 5262 - RNA, 21 nt, Artificial Sequence
  Description of Artificial Sequence: Synthetic oligonucleotide
uuuuccaucuuuagcguaaaa

SEQ ID NO: 5263 - RNA, 21 nt, Artificial Sequence
  Description of Artificial Sequence: Synthetic oligonucleotide
uacgcuaaagauggaaaagaa

SEQ ID NO: 5264 - RNA, 21 nt, Artificial Sequence
  Description of Artificial Sequence: Synthetic oligonucleotide
cuuuuccaucuuuagcguaaa

SEQ ID NO: 5265 - RNA, 21 nt, Artificial Sequence
  Description of Artificial Sequence: Synthetic oligonucleotide
acgcuaaagauggaaaagaac

SEQ ID NO: 5266 - RNA, 21 nt, Artificial Sequence
  Description of Artificial Sequence: Synthetic oligonucleotide
ucuuuuccaucuuuagcguaa

SEQ ID NO: 5267 - RNA, 21 nt, Artificial Sequence
  Description of Artificial Sequence: Synthetic oligonucleotide
cgcuaaagauggaaaagaacu

SEQ ID NO: 5268 - RNA, 21 nt, Artificial Sequence
  Description of Artificial Sequence: Synthetic oligonucleotide
uucuuuuccaucuuuagcgua

SEQ ID NO: 5269 - RNA, 21 nt, Artificial Sequence
  Description of Artificial Sequence: Synthetic oligonucleotide
gcuaaagauggaaaagaacua

SEQ ID NO: 5270 - RNA, 21 nt, Artificial Sequence
  Description of Artificial Sequence: Synthetic oligonucleotide
guucuuuuccaucuuuagcgu

SEQ ID NO: 5271 - RNA, 21 nt, Artificial Sequence
  Description of Artificial Sequence: Synthetic oligonucleotide
cuaaagauggaaaagaacuag

SEQ ID NO: 5272 - RNA, 21 nt, Artificial Sequence
  Description of Artificial Sequence: Synthetic oligonucleotide
aguucuuuuccaucuuuagcg

SEQ ID NO: 5273 - RNA, 21 nt, Artificial Sequence
  Description of Artificial Sequence: Synthetic oligonucleotide
uaaagauggaaaagaacuagg

SEQ ID NO: 5274 - RNA, 21 nt, Artificial Sequence
  Description of Artificial Sequence: Synthetic oligonucleotide
uaguucuuuuccaucuuuagc

SEQ ID NO: 5275 - RNA, 21 nt, Artificial Sequence
  Description of Artificial Sequence: Synthetic oligonucleotide
aaagauggaaaagaacuagga

SEQ ID NO: 5276 - RNA, 21 nt, Artificial Sequence
  Description of Artificial Sequence: Synthetic oligonucleotide
cuaguucuuuuccaucuuuag

SEQ ID NO: 5277 - RNA, 21 nt, Artificial Sequence
  Description of Artificial Sequence: Synthetic oligonucleotide
aagauggaaaagaacuaggac

SEQ ID NO: 5278 - RNA, 21 nt, Artificial Sequence
  Description of Artificial Sequence: Synthetic oligonucleotide
ccuaguucuuuuccaucuuua

SEQ ID NO: 5279 - RNA, 21 nt, Artificial Sequence
  Description of Artificial Sequence: Synthetic oligonucleotide
agauggaaaagaacuaggacu

SEQ ID NO: 5280 - RNA, 21 nt, Artificial Sequence
  Description of Artificial Sequence: Synthetic oligonucleotide
uccuaguucuuuuccaucuuu

SEQ ID NO: 5281 - RNA, 21 nt, Artificial Sequence
  Description of Artificial Sequence: Synthetic oligonucleotide
gauggaaaagaacuaggacug

SEQ ID NO: 5282 - RNA, 21 nt, Artificial Sequence
  Description of Artificial Sequence: Synthetic oligonucleotide
guccuaguucuuuuccaucuu

SEQ ID NO: 5283 - RNA, 21 nt, Artificial Sequence
  Description of Artificial Sequence: Synthetic oligonucleotide
auggaaaagaacuaggacuga

SEQ ID NO: 5284 - RNA, 21 nt, Artificial Sequence
  Description of Artificial Sequence: Synthetic oligonucleotide
aguccuaguucuuuuccaucu

SEQ ID NO: 5285 - RNA, 21 nt, Artificial Sequence
  Description of Artificial Sequence: Synthetic oligonucleotide
uggaaaagaacuaggacugaa

SEQ ID NO: 5286 - RNA, 21 nt, Artificial Sequence
  Description of Artificial Sequence: Synthetic oligonucleotide
caguccuaguucuuuuccauc

SEQ ID NO: 5287 - RNA, 21 nt, Artificial Sequence
  Description of Artificial Sequence: Synthetic oligonucleotide
ggaaaagaacuaggacugaac

SEQ ID NO: 5288 - RNA, 21 nt, Artificial Sequence
  Description of Artificial Sequence: Synthetic oligonucleotide
ucaguccuaguucuuuuccau

SEQ ID NO: 5289 - RNA, 21 nt, Artificial Sequence
  Description of Artificial Sequence: Synthetic oligonucleotide
gaaaagaacuaggacugaacu

SEQ ID NO: 5290 - RNA, 21 nt, Artificial Sequence
  Description of Artificial Sequence: Synthetic oligonucleotide
uucaguccuaguucuuuucca

SEQ ID NO: 5291 - RNA, 21 nt, Artificial Sequence
  Description of Artificial Sequence: Synthetic oligonucleotide
aaaagaacuaggacugaacua

SEQ ID NO: 5292 - RNA, 21 nt, Artificial Sequence
  Description of Artificial Sequence: Synthetic oligonucleotide
guucaguccuaguucuuuucc

SEQ ID NO: 5293 - RNA, 21 nt, Artificial Sequence
  Description of Artificial Sequence: Synthetic oligonucleotide
aaagaacuaggacugaacuau

SEQ ID NO: 5294 - RNA, 21 nt, Artificial Sequence
  Description of Artificial Sequence: Synthetic oligonucleotide
aguucaguccuaguucuuuuc

SEQ ID NO: 5295 - RNA, 21 nt, Artificial Sequence
  Description of Artificial Sequence: Synthetic oligonucleotide
aagaacuaggacugaacuauu

SEQ ID NO: 5296 - RNA, 21 nt, Artificial Sequence
  Description of Artificial Sequence: Synthetic oligonucleotide
uaguucaguccuaguucuuuu

SEQ ID NO: 5297 - RNA, 21 nt, Artificial Sequence
  Description of Artificial Sequence: Synthetic oligonucleotide
agaacuaggacugaacuauuu

SEQ ID NO: 5298 - RNA, 21 nt, Artificial Sequence
  Description of Artificial Sequence: Synthetic oligonucleotide
auaguucaguccuaguucuuu

SEQ ID NO: 5299 - RNA, 21 nt, Artificial Sequence
  Description of Artificial Sequence: Synthetic oligonucleotide
gaacuaggacugaacuauuuu

SEQ ID NO: 5300 - RNA, 21 nt, Artificial Sequence
  Description of Artificial Sequence: Synthetic oligonucleotide
aauaguucaguccuaguucuu

SEQ ID NO: 5301 - RNA, 21 nt, Artificial Sequence
  Description of Artificial Sequence: Synthetic oligonucleotide
aacuaggacugaacuauuuua

SEQ ID NO: 5302 - RNA, 21 nt, Artificial Sequence
  Description of Artificial Sequence: Synthetic oligonucleotide
aaauaguucaguccuaguucu

SEQ ID NO: 5303 - RNA, 21 nt, Artificial Sequence
  Description of Artificial Sequence: Synthetic oligonucleotide
acuaggacugaacuauuuuaa

SEQ ID NO: 5304 - RNA, 21 nt, Artificial Sequence
  Description of Artificial Sequence: Synthetic oligonucleotide
aaaauaguucaguccuaguuc

SEQ ID NO: 5305 - RNA, 21 nt, Artificial Sequence
  Description of Artificial Sequence: Synthetic oligonucleotide
cuaggacugaacuauuuuaaa

SEQ ID NO: 5306 - RNA, 21 nt, Artificial Sequence
  Description of Artificial Sequence: Synthetic oligonucleotide
uaaaauaguucaguccuaguu

SEQ ID NO: 5307 - RNA, 21 nt, Artificial Sequence
  Description of Artificial Sequence: Synthetic oligonucleotide
uaggacugaacuauuuuaaau

SEQ ID NO: 5308 - RNA, 21 nt, Artificial Sequence
  Description of Artificial Sequence: Synthetic oligonucleotide
uuaaaauaguucaguccuagu

SEQ ID NO: 5309 - RNA, 21 nt, Artificial Sequence
  Description of Artificial Sequence: Synthetic oligonucleotide
aggacugaacuauuuuaaaua

SEQ ID NO: 5310 - RNA, 21 nt, Artificial Sequence
  Description of Artificial Sequence: Synthetic oligonucleotide
uuuaaaauaguucaguccuag

SEQ ID NO: 5311 - RNA, 21 nt, Artificial Sequence
  Description of Artificial Sequence: Synthetic oligonucleotide
ggacugaacuauuuuaaauaa

SEQ ID NO: 5312 - RNA, 21 nt, Artificial Sequence
  Description of Artificial Sequence: Synthetic oligonucleotide
auuuaaaauaguucaguccua

SEQ ID NO: 5313 - RNA, 21 nt, Artificial Sequence
  Description of Artificial Sequence: Synthetic oligonucleotide
gacugaacuauuuuaaauaaa

SEQ ID NO: 5314 - RNA, 21 nt, Artificial Sequence
  Description of Artificial Sequence: Synthetic oligonucleotide
uauuuaaaauaguucaguccu

SEQ ID NO: 5315 - RNA, 21 nt, Artificial Sequence
  Description of Artificial Sequence: Synthetic oligonucleotide
acugaacuauuuuaaauaaaa

SEQ ID NO: 5316 - RNA, 21 nt, Artificial Sequence
  Description of Artificial Sequence: Synthetic oligonucleotide
uuauuuaaaauaguucagucc

SEQ ID NO: 5317 - RNA, 21 nt, Artificial Sequence
  Description of Artificial Sequence: Synthetic oligonucleotide
cugaacuauuuuaaauaaaau

SEQ ID NO: 5318 - RNA, 21 nt, Artificial Sequence
  Description of Artificial Sequence: Synthetic oligonucleotide
uuuauuuaaaauaguucaguc

SEQ ID NO: 5319 - RNA, 21 nt, Artificial Sequence
  Description of Artificial Sequence: Synthetic oligonucleotide
ugaacuauuuuaaauaaaaua

SEQ ID NO: 5320 - RNA, 21 nt, Artificial Sequence
  Description of Artificial Sequence: Synthetic oligonucleotide
uuuuauuuaaaauaguucagu

SEQ ID NO: 5321 - RNA, 21 nt, Artificial Sequence
  Description of Artificial Sequence: Synthetic oligonucleotide
gaacuauuuuaaauaaaauau

SEQ ID NO: 5322 - RNA, 21 nt, Artificial Sequence
  Description of Artificial Sequence: Synthetic oligonucleotide
auuuuauuuaaaauaguucag

SEQ ID NO: 5323 - RNA, 21 nt, Artificial Sequence
  Description of Artificial Sequence: Synthetic oligonucleotide
aacuauuuuaaauaaaauauu

SEQ ID NO: 5324 - RNA, 21 nt, Artificial Sequence
  Description of Artificial Sequence: Synthetic oligonucleotide
uauuuuauuuaaaauaguuca

SEQ ID NO: 5325 - RNA, 21 nt, Artificial Sequence
  Description of Artificial Sequence: Synthetic oligonucleotide
acuauuuuaaauaaaauauug

SEQ ID NO: 5326 - RNA, 21 nt, Artificial Sequence
  Description of Artificial Sequence: Synthetic oligonucleotide
auauuuuauuuaaaauaguuc

SEQ ID NO: 5327 - RNA, 21 nt, Artificial Sequence
  Description of Artificial Sequence: Synthetic oligonucleotide
cuauuuuaaauaaaauauugg

SEQ ID NO: 5328 - RNA, 21 nt, Artificial Sequence
  Description of Artificial Sequence: Synthetic oligonucleotide
aauauuuuauuuaaaauaguu

SEQ ID NO: 5329 - RNA, 21 nt, Artificial Sequence
  Description of Artificial Sequence: Synthetic oligonucleotide
uauuuuaaauaaaauauuggc

SEQ ID NO: 5330 - RNA, 21 nt, Artificial Sequence
  Description of Artificial Sequence: Synthetic oligonucleotide
caauauuuuauuuaaaauagu

SEQ ID NO: 5331 - RNA, 21 nt, Artificial Sequence
  Description of Artificial Sequence: Synthetic oligonucleotide
auuuuaaauaaaauauuggca

SEQ ID NO: 5332 - RNA, 21 nt, Artificial Sequence
  Description of Artificial Sequence: Synthetic oligonucleotide
ccaauauuuuauuuaaaauag

SEQ ID NO: 5333 - RNA, 21 nt, Artificial Sequence
  Description of Artificial Sequence: Synthetic oligonucleotide
uuuuaaauaaaauauuggcaa

SEQ ID NO: 5334 - RNA, 21 nt, Artificial Sequence
  Description of Artificial Sequence: Synthetic oligonucleotide
gccaauauuuuauuuaaaaua

SEQ ID NO: 5335 - RNA, 21 nt, Artificial Sequence
  Description of Artificial Sequence: Synthetic oligonucleotide
uuuaaauaaaauauuggcaaa

SEQ ID NO: 5336 - RNA, 21 nt, Artificial Sequence
  Description of Artificial Sequence: Synthetic oligonucleotide
ugccaauauuuuauuuaaaau

SEQ ID NO: 5337 - RNA, 21 nt, Artificial Sequence
  Description of Artificial Sequence: Synthetic oligonucleotide
uuaaauaaaauauuggcaaaa

SEQ ID NO: 5338 - RNA, 21 nt, Artificial Sequence
  Description of Artificial Sequence: Synthetic oligonucleotide
uugccaauauuuuauuuaaaa

SEQ ID NO: 5339 - RNA, 21 nt, Artificial Sequence
  Description of Artificial Sequence: Synthetic oligonucleotide
uaaauaaaauauuggcaaaag

SEQ ID NO: 5340 - RNA, 21 nt, Artificial Sequence
  Description of Artificial Sequence: Synthetic oligonucleotide
uuugccaauauuuuauuuaaa

SEQ ID NO: 5341 - RNA, 21 nt, Artificial Sequence
  Description of Artificial Sequence: Synthetic oligonucleotide
aaauaaaauauuggcaaaaga

SEQ ID NO: 5342 - RNA, 21 nt, Artificial Sequence
  Description of Artificial Sequence: Synthetic oligonucleotide
uuuugccaauauuuuauuuaa

SEQ ID NO: 5343 - RNA, 21 nt, Artificial Sequence
  Description of Artificial Sequence: Synthetic oligonucleotide
aauaaaauauuggcaaaagaa

SEQ ID NO: 5344 - RNA, 21 nt, Artificial Sequence
  Description of Artificial Sequence: Synthetic oligonucleotide
cuuuugccaauauuuuauuua

SEQ ID NO: 5345 - RNA, 21 nt, Artificial Sequence
  Description of Artificial Sequence: Synthetic oligonucleotide
auaaaauauuggcaaaagaaa

SEQ ID NO: 5346 - RNA, 21 nt, Artificial Sequence
  Description of Artificial Sequence: Synthetic oligonucleotide
ucuuuugccaauauuuuauuu

SEQ ID NO: 5347 - RNA, 21 nt, Artificial Sequence
  Description of Artificial Sequence: Synthetic oligonucleotide
uaaaauauuggcaaaagaaaa

SEQ ID NO: 5348 - RNA, 21 nt, Artificial Sequence
  Description of Artificial Sequence: Synthetic oligonucleotide
uucuuuugccaauauuuuauu

SEQ ID NO: 5349 - RNA, 21 nt, Artificial Sequence
  Description of Artificial Sequence: Synthetic oligonucleotide
aaaauauuggcaaaagaaaaa

SEQ ID NO: 5350 - protein, 16 aa, Unknown
  Description of Unknown: RFGF peptide
AAVALLPAVLLALLAP

SEQ ID NO: 5351 - protein, 11 aa, Unknown
  Description of Unknown: RFGF analogue peptide
AALLPVLLAAP

SEQ ID NO: 5352 - protein, 13 aa, Human immunodeficiency virus
GRKKRRQRRRPPQ

SEQ ID NO: 5353 - protein, 15 aa, Drosophila sp.
RQIKIWFQNRRMKWK

SEQ ID NO: 5354 - DNA, 21 bp, Artificial Sequence
  Description of Artificial Sequence: Synthetic oligonucleotide
  Description of Combined DNA/RNA Molecule: Synthetic oligonucleotide
gcugugcugaagaaguucatt

SEQ ID NO: 5355 - DNA, 21 bp, Artificial Sequence
  Description of Artificial Sequence: Synthetic oligonucleotide
  Description of Combined DNA/RNA Molecule: Synthetic oligonucleotide
ugaacuucuucagcacagctt

SEQ ID NO: 5356 - DNA, 2414 bp, Mus musculus
agaagggagaaaacttcatctgcaagatgggtgtctaccgcatccgcgtctccaccggggactccgtgtacgcgggctccaacaacgaggtctacctgtggttgatcggacagcatggggaggcatctctcgggaagctgttccgaccctgtcggaactcggaggcagaattcaaggtggatgtgtcagaataccttgggccactgctgtttgtgagagtgcagaaatggcattatctcaaagaggacgcctggttctgcaactggatttctgtgaagggccccggagaccagggatcggagtacacgttcccctgttaccgatgggttcagggcaccagcatcctgaacctccctgagggcactggctgcaccgtggttgaagactctcaaggcctgttcaggaaccacagggaggaggaactggaagaaaggaggagtctgtacaggtggggcaactggaaggatggcacaatcctgaacgtggcggcgaccagtatctctgacctccctgtagaccagcgatttcgagaggacaaaagacttgaatttgaagcttcacaggttctggggacaatggacaccgttattaacttccctaaaaacactgtgacctgctggaaaagcctagatgacttcaactatgttttcaagagtggccacaccaagatggctgagcgggttcgaaactcctggaaagaggatgctttctttgggtaccagtttctcaatggtgctaaccccatggtgctgaagcggtctacttgtctccctgcccgcctggtattccctccggggatggagaagctacaggcccagctggatgaggagctcaagaaaggcactctgtttgaagcggatttcttccttctggatgggatcaaggccaatgtcatcctttgtagtcagcagtacctggctgcccccctcgtcatgctgaagctgcagcccgatgggcaactcttgcctatagccatccagctcgaactgcccaaaactgggtctaccccaccgccgattttcacgcccttggatcccccaatggactggctcctggccaaatgctgggtccgaagctcagacttacagcttcatgagctacaggctcatcttctgaggggacacttggtggctgaggtctttgctgtggccaccatgaggtgcctgccttccgtgcaccctgtttttaagcttctagttcctcacctactctacaccatggaaatcaatgtccgggccaggagcgacctgatctcagagagaggcttttttgacaaggtgatgagcacaggtggaggaggccacctggatcttctcaagcaagctggagccttcctgacctacagctcattgtgtccccctgatgacttggctgagcgaggactcctggatattgacacttgcttctatgctaaagatgccctgcagctctggcaagtcatgaatcggtacgtggtgggaatgttcgatctctactacaagaccgaccaagctgttcaggatgactatgaactgcagagctggtgtcaagagatcactgagattgggttgcaaggtgcccaggacagaggcttccccacctccctccagtcccgggctcaggcttgccacttcatcaccatgtgcatcttcacatgcactgcgcagcactcttccatccatcttggccagctggattggttctactgggttcctaatgcaccctgcaccatgcggctgccaccacctaaaaccaaggacgcgacgatggagaagctgatggcgacgctgcccaatcctaatcagtctactctccagataaatgtcgtttggctcctgggcagacgccaggctgttatggtgcccctgggccagcattcagaggaacacttcccaaaccctgaggccaaagctgtgctgaagaagttcagagaggagctggctgccttggataaggaaattgagattcgtaacaagagcttggacataccttatgagtacctgcggcccagcctggtagaaaacagcgtggccatatgaccatcccccctctcgatttgttatttaatcaagaccactcaagtgcatccctgtgcttgagccccgccctctgccagtgtggaacccttttccaagagcccgctttccatagtctgctgtagtgaacacattttgctttggatgcgttacccagagtgccacttttcattcatcctttctgcttttccttccccatagggtaaataatagccatgcttgggaaaagcaccccgggaacacaaaagggtgataatatacattgttacacatcgtctatgaatcaaatagatctcaagccttaatagagtctaatagcaacaataaaagatgttttgggctagtgatagaaaagaacagggacctaattattttaaataaaatgttgcaaagattata

SEQ ID NO: 5357 - DNA, 2715 bp, Homo sapiens
gagcgaaacatctttgagcaagatgggtctctaccgcatccgcgtgtccactggggcctcgctctatgccggttccaacaaccaggtgcagctgtggctggtcggccagcacggggaggcggcgctcgggaagcgactgtggcccgcacggggcaaggagacagaactcaaggtggaagtaccggagtatctggggccgctgctgtttgtgaaactgcgcaaacggcacctccttaaggacgacgcctggttctgcaactggatctctgtgcagggccccggagccggggacgaggtcaggttcccttgttaccgctgggtggagggcaacggcgtcctgagcctgcctgaaggcaccggccgcactgtgggcgaggaccctcagggcctgttccagaaacaccgggaagaagagctggaagagagaaggaagttgtaccggtggggaaactggaaggacgggttaattctgaatatggctggggccaaactatatgacctccctgtggatgagcgatttctggaagacaagagagttgactttgaggtttcgctggccaaggggctggccgacctcgctatcaaagactctctaaatgttctgacttgctggaaggatctagatgacttcaaccggattttctggtgtggtcagagcaagctggctgagcgcgtgcgggactcctggaaggaagatgccttatttgggtaccagtttcttaatggcgccaaccccgtggtgctgaggcgctctgctcaccttcctgctcgcctagtgttccctccaggcatggaggaactgcaggcccagctggagaaggagctggagggaggcacactgttcgaagctgacttctccctgctggatgggatcaaggccaacgtcattctctgtagccagcagcacctggctgcccctctagtcatgctgaaattgcagcctgatgggaaactcttgcccatggtcatccagctccagctgccccgcacaggatccccaccacctccccttttcttgcctacggatcccccaatggcctggcttctggccaaatgctgggtgcgcagctctgacttccagctccatgagctgcagtctcatcttctgaggggacacttgatggctgaggtcattgttgtggccaccatgaggtgcctgccgtcgatacatcctatcttcaagcttataattccccacctgcgatacaccctggaaattaacgtccgggccaggactgggctggtctctgacatgggaattttcgaccagataatgagcactggtgggggaggccacgtgcagctgctcaagcaagctggagccttcctaacctacagctccttctgtccccctgatgacttggccgaccgggggctcctgggagtgaagtcttccttctatgcccaagatgcgctgcggctctgggaaatcatctatcggtatgtggaaggaatcgtgagtctccactataagacagacgtggctgtgaaagacgacccagagctgcagacctggtgtcgagagatcactgaaatcgggctgcaaggggcccaggaccgagggtttcctgtctctttacaggctcgggaccaggtttgccactttgtcaccatgtgtatcttcacctgcaccggccaacacgcctctgtgcacctgggccagctggactggtactcttgggtgcctaatgcaccctgcacgatgcggctgcccccgccaaccaccaaggatgcaacgctggagacagtgatggcgacactgcccaacttccaccaggcttctctccagatgtccatcacttggcagctgggcagacgccagcccgttatggtggctgtgggccagcatgaggaggagtatttttcgggccctgagcctaaggctgtgctgaagaagttcagggaggagctggctgccctggataaggaaattgagatccggaatgcaaagctggacatgccctacgagtacctgcggcccagcgtggtggaaaacagtgtggccatctaagcgtcgccaccctttggttatttcagcccccatcacccaagccacaagctgaccccttcgtggttatagccctgccctcccaagtcccaccctcttcccatgtcccaccctccctagaggggcaccttttcatggtctctgcacccagtgaacacattttactctagaggcatcacctgggaccttactcctctttccttccttcctcctttcctatcttccttcctctctctcttcctctttcttcattcagatctatatggcaaatagccacaattatataaatcatttcaagactagaatagggggatataatacatattactccacaccttttatgaatcaaatatgatttttttgttgttgttaagacagagtctcactttgacacccaggctggagtgcagtggtgccatcaccacggctcactgcagcctcagcgtcctgggctcaaatgatcctcccacctcagcctcctgagtagctgggactacaggctcatgccatcatgcccagctaatatttttttattttcgtggagacggggcctcactatgttgcctaggctggaaataggattttgaacccaaattgagtttaacaataataaaaagttgttttacgctaaagatggaaaagaactaggactgaactattttaaataaaatattggcaaaagaaaaaaaaaaaaaaaaaaaaaaaaa

SEQ ID NO: 5358 - DNA, 21 bp, Artificial Sequence
  Description of Artificial Sequence: Synthetic oligonucleotide
  Description of Combined DNA/RNA Molecule: Synthetic oligonucleotide
guccaucagcucgguuagatt

SEQ ID NO: 5359 - DNA, 21 bp, Artificial Sequence
  Description of Artificial Sequence: Synthetic oligonucleotide
  Description of Combined DNA/RNA Molecule: Synthetic oligonucleotide
ucuaaccgagcugauggactt

SEQ ID NO: 5360 - DNA, 21 bp, Artificial Sequence
  Description of Artificial Sequence: Synthetic oligonucleotide
  Description of Combined DNA/RNA Molecule: Synthetic oligonucleotide
gcugugcugaagaaguucatt

SEQ ID NO: 5361 - DNA, 21 bp, Artificial Sequence
  Description of Artificial Sequence: Synthetic oligonucleotide
  Description of Combined DNA/RNA Molecule: Synthetic oligonucleotide
ugaacuucuucagcacagctt

SEQ ID NO: 5362 - DNA, 21 bp, Artificial Sequence
  Description of Artificial Sequence: Synthetic oligonucleotide
  Description of Combined DNA/RNA Molecule: Synthetic oligonucleotide
guccaucagcucgguuagatt

SEQ ID NO: 5363 - DNA, 21 bp, Artificial Sequence
  Description of Artificial Sequence: Synthetic oligonucleotide
  Description of Combined DNA/RNA Molecule: Synthetic oligonucleotide
ucuaaccgagcugauggactt

SEQ ID NO: 5364 - DNA, 21 bp, Artificial Sequence
  Description of Artificial Sequence: Synthetic oligonucleotide
  Description of Combined DNA/RNA Molecule: Synthetic oligonucleotide
cuguggaugagcgauuucutt

SEQ ID NO: 5365 - DNA, 21 bp, Artificial Sequence
  Description of Artificial Sequence: Synthetic oligonucleotide
  Description of Combined DNA/RNA Molecule: Synthetic oligonucleotide
agaaaucgcucauccacagtt

SEQ ID NO: 5366 - RNA, 21 nt, Artificial Sequence
  Description of Artificial Sequence: Synthetic oligonucleotide
cuuugagcaagaugggucauu

SEQ ID NO: 5367 - RNA, 21 nt, Artificial Sequence
  Description of Artificial Sequence: Synthetic oligonucleotide
ugacccaucuugcucaaaguu

SEQ ID NO: 5368 - RNA, 21 nt, Artificial Sequence
  Description of Artificial Sequence: Synthetic oligonucleotide
gagcaagaugggucucuaauu

SEQ ID NO: 5369 - RNA, 21 nt, Artificial Sequence
  Description of Artificial Sequence: Synthetic oligonucleotide
uuagagacccaucuugcucuu

SEQ ID NO: 5370 - RNA, 21 nt, Artificial Sequence
  Description of Artificial Sequence: Synthetic oligonucleotide
agcaagaugggucucuacauu

SEQ ID NO: 5371 - RNA, 21 nt, Artificial Sequence
  Description of Artificial Sequence: Synthetic oligonucleotide
uguagagacccaucuugcuuu

SEQ ID NO: 5372 - RNA, 21 nt, Artificial Sequence
  Description of Artificial Sequence: Synthetic oligonucleotide
caagaugggucucuaccgauu

SEQ ID NO: 5373 - RNA, 21 nt, Artificial Sequence
  Description of Artificial Sequence: Synthetic oligonucleotide
ucgguagagacccaucuuguu

SEQ ID NO: 5374 - RNA, 21 nt, Artificial Sequence
  Description of Artificial Sequence: Synthetic oligonucleotide
aagaugggucucuaccgcauu

SEQ ID NO: 5375 - RNA, 21 nt, Artificial Sequence
  Description of Artificial Sequence: Synthetic oligonucleotide
ugcgguagagacccaucuuuu

SEQ ID NO: 5376 - RNA, 21 nt, Artificial Sequence
  Description of Artificial Sequence: Synthetic oligonucleotide
agaugggucucuaccgcaauu

SEQ ID NO: 5377 - RNA, 21 nt, Artificial Sequence
  Description of Artificial Sequence: Synthetic oligonucleotide
uugcgguagagacccaucuuu

SEQ ID NO: 5378 - RNA, 21 nt, Artificial Sequence
  Description of Artificial Sequence: Synthetic oligonucleotide
gaugggucucuaccgcauauu

SEQ ID NO: 5379 - RNA, 21 nt, Artificial Sequence
  Description of Artificial Sequence: Synthetic oligonucleotide
uaugcgguagagacccaucuu

SEQ ID NO: 5380 - RNA, 21 nt, Artificial Sequence
  Description of Artificial Sequence: Synthetic oligonucleotide
ggucucuaccgcauccgcauu

SEQ ID NO: 5381 - RNA, 21 nt, Artificial Sequence
  Description of Artificial Sequence: Synthetic oligonucleotide
ugcggaugcgguagagaccuu

SEQ ID NO: 5382 - RNA, 21 nt, Artificial Sequence
  Description of Artificial Sequence: Synthetic oligonucleotide
cuggucggccagcacgggauu

SEQ ID NO: 5383 - RNA, 21 nt, Artificial Sequence
  Description of Artificial Sequence: Synthetic oligonucleotide
ucccgugcuggccgaccaguu

SEQ ID NO: 5384 - RNA, 21 nt, Artificial Sequence
  Description of Artificial Sequence: Synthetic oligonucleotide
uggucggccagcacggggauu

SEQ ID NO: 5385 - RNA, 21 nt, Artificial Sequence
  Description of Artificial Sequence: Synthetic oligonucleotide
uccccgugcuggccgaccauu

SEQ ID NO: 5386 - RNA, 21 nt, Artificial Sequence
  Description of Artificial Sequence: Synthetic oligonucleotide
ggucggccagcacggggaauu

SEQ ID NO: 5387 - RNA, 21 nt, Artificial Sequence
  Description of Artificial Sequence: Synthetic oligonucleotide
uuccccgugcuggccgaccuu

SEQ ID NO: 5388 - RNA, 21 nt, Artificial Sequence
  Description of Artificial Sequence: Synthetic oligonucleotide
ucgggaagcgacuguggcauu

SEQ ID NO: 5389 - RNA, 21 nt, Artificial Sequence
  Description of Artificial Sequence: Synthetic oligonucleotide
ugccacagucgcuucccgauu

SEQ ID NO: 5390 - RNA, 21 nt, Artificial Sequence
  Description of Artificial Sequence: Synthetic oligonucleotide
ggaagcgacuguggcccgauu

SEQ ID NO: 5391 - RNA, 21 nt, Artificial Sequence
  Description of Artificial Sequence: Synthetic oligonucleotide
ucgggccacagucgcuuccuu

SEQ ID NO: 5392 - RNA, 21 nt, Artificial Sequence
  Description of Artificial Sequence: Synthetic oligonucleotide
agcgacuguggcccgcacauu

SEQ ID NO: 5393 - RNA, 21 nt, Artificial Sequence
  Description of Artificial Sequence: Synthetic oligonucleotide
ugugcgggccacagucgcuuu

SEQ ID NO: 5394 - RNA, 21 nt, Artificial Sequence
  Description of Artificial Sequence: Synthetic oligonucleotide
cuguggcccgcacggggcauu

SEQ ID NO: 5395 - RNA, 21 nt, Artificial Sequence
  Description of Artificial Sequence: Synthetic oligonucleotide
ugccccgugcgggccacaguu

SEQ ID NO: 5396 - RNA, 21 nt, Artificial Sequence
  Description of Artificial Sequence: Synthetic oligonucleotide
uguggcccgcacggggcaauu

SEQ ID NO: 5397 - RNA, 21 nt, Artificial Sequence
  Description of Artificial Sequence: Synthetic oligonucleotide
uugccccgugcgggccacauu

SEQ ID NO: 5398 - RNA, 21 nt, Artificial Sequence
  Description of Artificial Sequence: Synthetic oligonucleotide
uggcccgcacggggcaagauu

SEQ ID NO: 5399 - RNA, 21 nt, Artificial Sequence
  Description of Artificial Sequence: Synthetic oligonucleotide
ucuugccccgugcgggccauu

SEQ ID NO: 5400 - RNA, 21 nt, Artificial Sequence
  Description of Artificial Sequence: Synthetic oligonucleotide
ccaccugcgauacacccuauu

SEQ ID NO: 5401 - RNA, 21 nt, Artificial Sequence
  Description of Artificial Sequence: Synthetic oligonucleotide
uaggguguaucgcaggugguu

SEQ ID NO: 5402 - RNA, 21 nt, Artificial Sequence
  Description of Artificial Sequence: Synthetic oligonucleotide
caccugcgauacacccugauu

SEQ ID NO: 5403 - RNA, 21 nt, Artificial Sequence
  Description of Artificial Sequence: Synthetic oligonucleotide
ucaggguguaucgcagguguu

SEQ ID NO: 5404 - RNA, 21 nt, Artificial Sequence
  Description of Artificial Sequence: Synthetic oligonucleotide
cugcgauacacccuggaaauu

SEQ ID NO: 5405 - RNA, 21 nt, Artificial Sequence
  Description of Artificial Sequence: Synthetic oligonucleotide
uuuccaggguguaucgcaguu

SEQ ID NO: 5406 - RNA, 21 nt, Artificial Sequence
  Description of Artificial Sequence: Synthetic oligonucleotide
ugcgauacacccuggaaaauu

SEQ ID NO: 5407 - RNA, 21 nt, Artificial Sequence
  Description of Artificial Sequence: Synthetic oligonucleotide
uuuuccaggguguaucgcauu

SEQ ID NO: 5408 - RNA, 21 nt, Artificial Sequence
  Description of Artificial Sequence: Synthetic oligonucleotide
uacacccuggaaauuaacauu

SEQ ID NO: 5409 - RNA, 21 nt, Artificial Sequence
  Description of Artificial Sequence: Synthetic oligonucleotide
uguuaauuuccaggguguauu

SEQ ID NO: 5410 - RNA, 21 nt, Artificial Sequence
  Description of Artificial Sequence: Synthetic oligonucleotide
acccuggaaauuaacgucauu

SEQ ID NO: 5411 - RNA, 21 nt, Artificial Sequence
  Description of Artificial Sequence: Synthetic oligonucleotide
ugacguuaauuuccaggguuu

SEQ ID NO: 5412 - RNA, 21 nt, Artificial Sequence
  Description of Artificial Sequence: Synthetic oligonucleotide
ccuggaaauuaacguccgauu

SEQ ID NO: 5413 - RNA, 21 nt, Artificial Sequence
  Description of Artificial Sequence: Synthetic oligonucleotide
ucggacguuaauuuccagguu

SEQ ID NO: 5414 - RNA, 21 nt, Artificial Sequence
  Description of Artificial Sequence: Synthetic oligonucleotide
cuggaaauuaacguccggauu

SEQ ID NO: 5415 - RNA, 21 nt, Artificial Sequence
  Description of Artificial Sequence: Synthetic oligonucleotide
uccggacguuaauuuccaguu

SEQ ID NO: 5416 - RNA, 21 nt, Artificial Sequence
  Description of Artificial Sequence: Synthetic oligonucleotide
uggaaauuaacguccgggauu

SEQ ID NO: 5417 - RNA, 21 nt, Artificial Sequence
  Description of Artificial Sequence: Synthetic oligonucleotide
ucccggacguuaauuuccauu

SEQ ID NO: 5418 - RNA, 21 nt, Artificial Sequence
  Description of Artificial Sequence: Synthetic oligonucleotide
ggaaauuaacguccgggcauu

SEQ ID NO: 5419 - RNA, 21 nt, Artificial Sequence
  Description of Artificial Sequence: Synthetic oligonucleotide
ugcccggacguuaauuuccuu

SEQ ID NO: 5420 - RNA, 21 nt, Artificial Sequence
  Description of Artificial Sequence: Synthetic oligonucleotide
gaaauuaacguccgggccauu

SEQ ID NO: 5421 - RNA, 21 nt, Artificial Sequence
  Description of Artificial Sequence: Synthetic oligonucleotide
uggcccggacguuaauuucuu

SEQ ID NO: 5422 - RNA, 21 nt, Artificial Sequence
  Description of Artificial Sequence: Synthetic oligonucleotide
aauuaacguccgggccagauu

SEQ ID NO: 5423 - RNA, 21 nt, Artificial Sequence
  Description of Artificial Sequence: Synthetic oligonucleotide
ucuggcccggacguuaauuuu

SEQ ID NO: 5424 - RNA, 21 nt, Artificial Sequence
  Description of Artificial Sequence: Synthetic oligonucleotide
uaacguccgggccaggacauu

SEQ ID NO: 5425 - RNA, 21 nt, Artificial Sequence
  Description of Artificial Sequence: Synthetic oligonucleotide
uguccuggcccggacguuauu

SEQ ID NO: 5426 - RNA, 21 nt, Artificial Sequence
  Description of Artificial Sequence: Synthetic oligonucleotide
aacguccgggccaggacuauu

SEQ ID NO: 5427 - RNA, 21 nt, Artificial Sequence
  Description of Artificial Sequence: Synthetic oligonucleotide
uaguccuggcccggacguuuu

SEQ ID NO: 5428 - RNA, 21 nt, Artificial Sequence
  Description of Artificial Sequence: Synthetic oligonucleotide
gugaagucuuccuucuauauu

SEQ ID NO: 5429 - RNA, 21 nt, Artificial Sequence
  Description of Artificial Sequence: Synthetic oligonucleotide
uauagaaggaagacuucacuu

SEQ ID NO: 5430 - RNA, 21 nt, Artificial Sequence
  Description of Artificial Sequence: Synthetic oligonucleotide
ugaagucuuccuucuaugauu

SEQ ID NO: 5431 - RNA, 21 nt, Artificial Sequence
  Description of Artificial Sequence: Synthetic oligonucleotide
ucauagaaggaagacuucauu

SEQ ID NO: 5432 - RNA, 21 nt, Artificial Sequence
  Description of Artificial Sequence: Synthetic oligonucleotide
gaagucuuccuucuaugcauu

SEQ ID NO: 5433 - RNA, 21 nt, Artificial Sequence
  Description of Artificial Sequence: Synthetic oligonucleotide
ugcauagaaggaagacuucuu

SEQ ID NO: 5434 - RNA, 21 nt, Artificial Sequence
  Description of Artificial Sequence: Synthetic oligonucleotide
guauguggaaggaaucguauu

SEQ ID NO: 5435 - RNA, 21 nt, Artificial Sequence
  Description of Artificial Sequence: Synthetic oligonucleotide
uacgauuccuuccacauacuu

SEQ ID NO: 5436 - RNA, 21 nt, Artificial Sequence
  Description of Artificial Sequence: Synthetic oligonucleotide
aggaaucgugagucuccaauu

SEQ ID NO: 5437 - RNA, 21 nt, Artificial Sequence
  Description of Artificial Sequence: Synthetic oligonucleotide
uuggagacucacgauuccuuu

SEQ ID NO: 5438 - RNA, 21 nt, Artificial Sequence
  Description of Artificial Sequence: Synthetic oligonucleotide
gaaucgugagucuccacuauu

SEQ ID NO: 5439 - RNA, 21 nt, Artificial Sequence
  Description of Artificial Sequence: Synthetic oligonucleotide
uaguggagacucacgauucuu

SEQ ID NO: 5440 - RNA, 21 nt, Artificial Sequence
  Description of Artificial Sequence: Synthetic oligonucleotide
aaucgugagucuccacuaauu

SEQ ID NO: 5441 - RNA, 21 nt, Artificial Sequence
  Description of Artificial Sequence: Synthetic oligonucleotide
uuaguggagacucacgauuuu

SEQ ID NO: 5442 - RNA, 21 nt, Artificial Sequence
  Description of Artificial Sequence: Synthetic oligonucleotide
ucgugagucuccacuauaauu

SEQ ID NO: 5443 - RNA, 21 nt, Artificial Sequence
  Description of Artificial Sequence: Synthetic oligonucleotide
uuauaguggagacucacgauu

SEQ ID NO: 5444 - RNA, 21 nt, Artificial Sequence
  Description of Artificial Sequence: Synthetic oligonucleotide
gugagucuccacuauaagauu

SEQ ID NO: 5445 - RNA, 21 nt, Artificial Sequence
  Description of Artificial Sequence: Synthetic oligonucleotide
ucuuauaguggagacucacuu

SEQ ID NO: 5446 - RNA, 21 nt, Artificial Sequence
  Description of Artificial Sequence: Synthetic oligonucleotide
ugagucuccacuauaagaauu

SEQ ID NO: 5447 - RNA, 21 nt, Artificial Sequence
  Description of Artificial Sequence: Synthetic oligonucleotide
uucuuauaguggagacucauu

SEQ ID NO: 5448 - RNA, 21 nt, Artificial Sequence
  Description of Artificial Sequence: Synthetic oligonucleotide
gcagaccuggugucgagaauu

SEQ ID NO: 5449 - RNA, 21 nt, Artificial Sequence
  Description of Artificial Sequence: Synthetic oligonucleotide
uucucgacaccaggucugcuu

SEQ ID NO: 5450 - RNA, 21 nt, Artificial Sequence
  Description of Artificial Sequence: Synthetic oligonucleotide
cagaccuggugucgagagauu

SEQ ID NO: 5451 - RNA, 21 nt, Artificial Sequence
  Description of Artificial Sequence: Synthetic oligonucleotide
ucucucgacaccaggucuguu

SEQ ID NO: 5452 - RNA, 21 nt, Artificial Sequence
  Description of Artificial Sequence: Synthetic oligonucleotide
agaccuggugucgagagaauu

SEQ ID NO: 5453 - RNA, 21 nt, Artificial Sequence
  Description of Artificial Sequence: Synthetic oligonucleotide
uucucucgacaccaggucuuu

SEQ ID NO: 5454 - RNA, 21 nt, Artificial Sequence
  Description of Artificial Sequence: Synthetic oligonucleotide
gaccuggugucgagagauauu

SEQ ID NO: 5455 - RNA, 21 nt, Artificial Sequence
  Description of Artificial Sequence: Synthetic oligonucleotide
uaucucucgacaccaggucuu

SEQ ID NO: 5456 - RNA, 21 nt, Artificial Sequence
  Description of Artificial Sequence: Synthetic oligonucleotide
uggugucgagagaucacuauu

SEQ ID NO: 5457 - RNA, 21 nt, Artificial Sequence
  Description of Artificial Sequence: Synthetic oligonucleotide
uagugaucucucgacaccauu

SEQ ID NO: 5458 - RNA, 21 nt, Artificial Sequence
  Description of Artificial Sequence: Synthetic oligonucleotide
ggugucgagagaucacugauu

SEQ ID NO: 5459 - RNA, 21 nt, Artificial Sequence
  Description of Artificial Sequence: Synthetic oligonucleotide
ucagugaucucucgacaccuu

SEQ ID NO: 5460 - RNA, 21 nt, Artificial Sequence
  Description of Artificial Sequence: Synthetic oligonucleotide
ucgagagaucacugaaauauu

SEQ ID NO: 5461 - RNA, 21 nt, Artificial Sequence
  Description of Artificial Sequence: Synthetic oligonucleotide
uauuucagugaucucucgauu

SEQ ID NO: 5462 - RNA, 21 nt, Artificial Sequence
  Description of Artificial Sequence: Synthetic oligonucleotide
cgagagaucacugaaaucauu

SEQ ID NO: 5463 - RNA, 21 nt, Artificial Sequence
  Description of Artificial Sequence: Synthetic oligonucleotide
ugauuucagugaucucucguu

SEQ ID NO: 5464 - RNA, 21 nt, Artificial Sequence
  Description of Artificial Sequence: Synthetic oligonucleotide
gagagaucacugaaaucgauu

SEQ ID NO: 5465 - RNA, 21 nt, Artificial Sequence
  Description of Artificial Sequence: Synthetic oligonucleotide
ucgauuucagugaucucucuu

SEQ ID NO: 5466 - RNA, 21 nt, Artificial Sequence
  Description of Artificial Sequence: Synthetic oligonucleotide
agaucacugaaaucgggcauu

SEQ ID NO: 5467 - RNA, 21 nt, Artificial Sequence
  Description of Artificial Sequence: Synthetic oligonucleotide
ugcccgauuucagugaucuuu

SEQ ID NO: 5468 - RNA, 21 nt, Artificial Sequence
  Description of Artificial Sequence: Synthetic oligonucleotide
ucacugaaaucgggcugcauu

SEQ ID NO: 5469 - RNA, 21 nt, Artificial Sequence
  Description of Artificial Sequence: Synthetic oligonucleotide
ugcagcccgauuucagugauu

SEQ ID NO: 5470 - RNA, 21 nt, Artificial Sequence
  Description of Artificial Sequence: Synthetic oligonucleotide
cacugaaaucgggcugcaauu

SEQ ID NO: 5471 - RNA, 21 nt, Artificial Sequence
  Description of Artificial Sequence: Synthetic oligonucleotide
uugcagcccgauuucaguguu

SEQ ID NO: 5472 - RNA, 21 nt, Artificial Sequence
  Description of Artificial Sequence: Synthetic oligonucleotide
gaaaucgggcugcaagggauu

SEQ ID NO: 5473 - RNA, 21 nt, Artificial Sequence
  Description of Artificial Sequence: Synthetic oligonucleotide
ucccuugcagcccgauuucuu

SEQ ID NO: 5474 - RNA, 21 nt, Artificial Sequence
  Description of Artificial Sequence: Synthetic oligonucleotide
aaaucgggcugcaaggggauu

SEQ ID NO: 5475 - RNA, 21 nt, Artificial Sequence
  Description of Artificial Sequence: Synthetic oligonucleotide
uccccuugcagcccgauuuuu

SEQ ID NO: 5476 - RNA, 21 nt, Artificial Sequence
  Description of Artificial Sequence: Synthetic oligonucleotide
cagguuugccacuuugucauu

SEQ ID NO: 5477 - RNA, 21 nt, Artificial Sequence
  Description of Artificial Sequence: Synthetic oligonucleotide
ugacaaaguggcaaaccuguu

SEQ ID NO: 5478 - RNA, 21 nt, Artificial Sequence
  Description of Artificial Sequence: Synthetic oligonucleotide
uguaucuucaccugcaccauu

SEQ ID NO: 5479 - RNA, 21 nt, Artificial Sequence
  Description of Artificial Sequence: Synthetic oligonucleotide
uggugcaggugaagauacauu

SEQ ID NO: 5480 - RNA, 21 nt, Artificial Sequence
  Description of Artificial Sequence: Synthetic oligonucleotide
guaucuucaccugcaccgauu

SEQ ID NO: 5481 - RNA, 21 nt, Artificial Sequence
  Description of Artificial Sequence: Synthetic oligonucleotide
ucggugcaggugaagauacuu

SEQ ID NO: 5482 - RNA, 21 nt, Artificial Sequence
  Description of Artificial Sequence: Synthetic oligonucleotide
uucaccugcaccggccaaauu

SEQ ID NO: 5483 - RNA, 21 nt, Artificial Sequence
  Description of Artificial Sequence: Synthetic oligonucleotide
uuuggccggugcaggugaauu

SEQ ID NO: 5484 - RNA, 21 nt, Artificial Sequence
  Description of Artificial Sequence: Synthetic oligonucleotide
aaccaccaaggaugcaacauu

SEQ ID NO: 5485 - RNA, 21 nt, Artificial Sequence
  Description of Artificial Sequence: Synthetic oligonucleotide
uguugcauccuuggugguuuu

SEQ ID NO: 5486 - RNA, 21 nt, Artificial Sequence
  Description of Artificial Sequence: Synthetic oligonucleotide
ccaccaaggaugcaacgcauu

SEQ ID NO: 5487 - RNA, 21 nt, Artificial Sequence
  Description of Artificial Sequence: Synthetic oligonucleotide
ugcguugcauccuuggugguu

SEQ ID NO: 5488 - RNA, 21 nt, Artificial Sequence
  Description of Artificial Sequence: Synthetic oligonucleotide
ccaaggaugcaacgcuggauu

SEQ ID NO: 5489 - RNA, 21 nt, Artificial Sequence
  Description of Artificial Sequence: Synthetic oligonucleotide
uccagcguugcauccuugguu

SEQ ID NO: 5490 - RNA, 21 nt, Artificial Sequence
  Description of Artificial Sequence: Synthetic oligonucleotide
ggaugcaacgcuggagacauu

SEQ ID NO: 5491 - RNA, 21 nt, Artificial Sequence
  Description of Artificial Sequence: Synthetic oligonucleotide
ugucuccagcguugcauccuu

SEQ ID NO: 5492 - RNA, 21 nt, Artificial Sequence
  Description of Artificial Sequence: Synthetic oligonucleotide
augcaacgcuggagacagauu

SEQ ID NO: 5493 - RNA, 21 nt, Artificial Sequence
  Description of Artificial Sequence: Synthetic oligonucleotide
ucugucuccagcguugcauuu

SEQ ID NO: 5494 - RNA, 21 nt, Artificial Sequence
  Description of Artificial Sequence: Synthetic oligonucleotide
ugcaacgcuggagacaguauu

SEQ ID NO: 5495 - RNA, 21 nt, Artificial Sequence
  Description of Artificial Sequence: Synthetic oligonucleotide
uacugucuccagcguugcauu

SEQ ID NO: 5496 - RNA, 21 nt, Artificial Sequence
  Description of Artificial Sequence: Synthetic oligonucleotide
cagauguccaucacuuggauu

SEQ ID NO: 5497 - RNA, 21 nt, Artificial Sequence
  Description of Artificial Sequence: Synthetic oligonucleotide
uccaagugauggacaucuguu

SEQ ID NO: 5498 - RNA, 21 nt, Artificial Sequence
  Description of Artificial Sequence: Synthetic oligonucleotide
ggaggaguauuuuucgggauu

SEQ ID NO: 5499 - RNA, 21 nt, Artificial Sequence
  Description of Artificial Sequence: Synthetic oligonucleotide
ucccgaaaaauacuccuccuu

SEQ ID NO: 5500 - RNA, 21 nt, Artificial Sequence
  Description of Artificial Sequence: Synthetic oligonucleotide
gaggaguauuuuucgggcauu

SEQ ID NO: 5501 - RNA, 21 nt, Artificial Sequence
  Description of Artificial Sequence: Synthetic oligonucleotide
ugcccgaaaaauacuccucuu

SEQ ID NO: 5502 - RNA, 21 nt, Artificial Sequence
  Description of Artificial Sequence: Synthetic oligonucleotide
uccggaaugcaaagcuggauu

SEQ ID NO: 5503 - RNA, 21 nt, Artificial Sequence
  Description of Artificial Sequence: Synthetic oligonucleotide
uccagcuuugcauuccggauu

SEQ ID NO: 5504 - RNA, 21 nt, Artificial Sequence
  Description of Artificial Sequence: Synthetic oligonucleotide
ugcaaagcuggacaugccauu

SEQ ID NO: 5505 - RNA, 21 nt, Artificial Sequence
  Description of Artificial Sequence: Synthetic oligonucleotide
uggcauguccagcuuugcauu

SEQ ID NO: 5506 - RNA, 21 nt, Artificial Sequence
  Description of Artificial Sequence: Synthetic oligonucleotide
gaaaacaguguggccaucauu

SEQ ID NO: 5507 - RNA, 21 nt, Artificial Sequence
  Description of Artificial Sequence: Synthetic oligonucleotide
ugauggccacacuguuuucuu

SEQ ID NO: 5508 - RNA, 21 nt, Artificial Sequence
  Description of Artificial Sequence: Synthetic oligonucleotide
cacccaagccacaagcugauu

SEQ ID NO: 5509 - RNA, 21 nt, Artificial Sequence
  Description of Artificial Sequence: Synthetic oligonucleotide
ucagcuuguggcuuggguguu

SEQ ID NO: 5510 - RNA, 21 nt, Artificial Sequence
  Description of Artificial Sequence: Synthetic oligonucleotide
gcaccuuuucauggucucauu

SEQ ID NO: 5511 - RNA, 21 nt, Artificial Sequence
  Description of Artificial Sequence: Synthetic oligonucleotide
ugagaccaugaaaaggugcuu

SEQ ID NO: 5512 - RNA, 21 nt, Artificial Sequence
  Description of Artificial Sequence: Synthetic oligonucleotide
gaacacauuuuacucuagauu

SEQ ID NO: 5513 - RNA, 21 nt, Artificial Sequence
  Description of Artificial Sequence: Synthetic oligonucleotide
ucuagaguaaaauguguucuu

SEQ ID NO: 5514 - RNA, 21 nt, Artificial Sequence
  Description of Artificial Sequence: Synthetic oligonucleotide
uuacucuagaggcaucacauu

SEQ ID NO: 5515 - RNA, 21 nt, Artificial Sequence
  Description of Artificial Sequence: Synthetic oligonucleotide
ugugaugccucuagaguaauu

SEQ ID NO: 5516 - RNA, 21 nt, Artificial Sequence
  Description of Artificial Sequence: Synthetic oligonucleotide
ucuagaggcaucaccuggauu

SEQ ID NO: 5517 - RNA, 21 nt, Artificial Sequence
  Description of Artificial Sequence: Synthetic oligonucleotide
uccaggugaugccucuagauu

SEQ ID NO: 5518 - RNA, 21 nt, Artificial Sequence
  Description of Artificial Sequence: Synthetic oligonucleotide
ucuucauucagaucuauaauu

SEQ ID NO: 5519 - RNA, 21 nt, Artificial Sequence
  Description of Artificial Sequence: Synthetic oligonucleotide
uuauagaucugaaugaagauu

SEQ ID NO: 5520 - RNA, 21 nt, Artificial Sequence
  Description of Artificial Sequence: Synthetic oligonucleotide
gucucuaccgcauccgcgauu

SEQ ID NO: 5521 - RNA, 21 nt, Artificial Sequence
  Description of Artificial Sequence: Synthetic oligonucleotide
ucgcggaugcgguagagacuu

SEQ ID NO: 5522 - RNA, 21 nt, Artificial Sequence
  Description of Artificial Sequence: Synthetic oligonucleotide
aagcuggagccuuccuaaauu

SEQ ID NO: 5523 - RNA, 21 nt, Artificial Sequence
  Description of Artificial Sequence: Synthetic oligonucleotide
uuuaggaaggcuccagcuuuu

SEQ ID NO: 5524 - RNA, 21 nt, Artificial Sequence
  Description of Artificial Sequence: Synthetic oligonucleotide
agcuggagccuuccuaacauu

SEQ ID NO: 5525 - RNA, 21 nt, Artificial Sequence
  Description of Artificial Sequence: Synthetic oligonucleotide
uguuaggaaggcuccagcuuu

SEQ ID NO: 5526 - RNA, 21 nt, Artificial Sequence
  Description of Artificial Sequence: Synthetic oligonucleotide
uugggugccuaaugcaccauu

SEQ ID NO: 5527 - RNA, 21 nt, Artificial Sequence
  Description of Artificial Sequence: Synthetic oligonucleotide
uggugcauuaggcacccaauu

SEQ ID NO: 5528 - RNA, 21 nt, Artificial Sequence
  Description of Artificial Sequence: Synthetic oligonucleotide
ugccuaaugcacccugcaauu

SEQ ID NO: 5529 - RNA, 21 nt, Artificial Sequence
  Description of Artificial Sequence: Synthetic oligonucleotide
uugcagggugcauuaggcauu

SEQ ID NO: 5530 - RNA, 21 nt, Artificial Sequence
  Description of Artificial Sequence: Synthetic oligonucleotide
guguccacuggggccucgauu

SEQ ID NO: 5531 - RNA, 21 nt, Artificial Sequence
  Description of Artificial Sequence: Synthetic oligonucleotide
ucgaggccccaguggacacuu

SEQ ID NO: 5532 - RNA, 21 nt, Artificial Sequence
  Description of Artificial Sequence: Synthetic oligonucleotide
gauacauccuaucuucaaauu

SEQ ID NO: 5533 - RNA, 21 nt, Artificial Sequence
  Description of Artificial Sequence: Synthetic oligonucleotide
uuugaagauaggauguaucuu

SEQ ID NO: 5534 - RNA, 21 nt, Artificial Sequence
  Description of Artificial Sequence: Synthetic oligonucleotide
auuccccaccugcgauacauu

SEQ ID NO: 5535 - RNA, 21 nt, Artificial Sequence
  Description of Artificial Sequence: Synthetic oligonucleotide
uguaucgcagguggggaauuu

SEQ ID NO: 5536 - RNA, 21 nt, Artificial Sequence
  Description of Artificial Sequence: Synthetic oligonucleotide
uuccccaccugcgauacaauu

SEQ ID NO: 5537 - RNA, 21 nt, Artificial Sequence
  Description of Artificial Sequence: Synthetic oligonucleotide
uuguaucgcagguggggaauu

SEQ ID NO: 5538 - RNA, 21 nt, Artificial Sequence
  Description of Artificial Sequence: Synthetic oligonucleotide
uuucgaccagauaaugagauu

SEQ ID NO: 5539 - RNA, 21 nt, Artificial Sequence
  Description of Artificial Sequence: Synthetic oligonucleotide
ucucauuaucuggucgaaauu

SEQ ID NO: 5540 - RNA, 21 nt, Artificial Sequence
  Description of Artificial Sequence: Synthetic oligonucleotide
ucgaccagauaaugagcaauu

SEQ ID NO: 5541 - RNA, 21 nt, Artificial Sequence
  Description of Artificial Sequence: Synthetic oligonucleotide
uugcucauuaucuggucgauu

SEQ ID NO: 5542 - RNA, 21 nt, Artificial Sequence
  Description of Artificial Sequence: Synthetic oligonucleotide
cugcucaagcaagcuggaauu

SEQ ID NO: 5543 - RNA, 21 nt, Artificial Sequence
  Description of Artificial Sequence: Synthetic oligonucleotide
uuccagcuugcuugagcaguu

SEQ ID NO: 5544 - RNA, 21 nt, Artificial Sequence
  Description of Artificial Sequence: Synthetic oligonucleotide
acugaaaucgggcugcaaauu

SEQ ID NO: 5545 - RNA, 21 nt, Artificial Sequence
  Description of Artificial Sequence: Synthetic oligonucleotide
uuugcagcccgauuucaguuu

SEQ ID NO: 5546 - RNA, 21 nt, Artificial Sequence
  Description of Artificial Sequence: Synthetic oligonucleotide
ugaaaucgggcugcaaggauu

SEQ ID NO: 5547 - RNA, 21 nt, Artificial Sequence
  Description of Artificial Sequence: Synthetic oligonucleotide
uccuugcagcccgauuucauu

SEQ ID NO: 5548 - RNA, 21 nt, Artificial Sequence
  Description of Artificial Sequence: Synthetic oligonucleotide
aaucgggcugcaaggggcauu

SEQ ID NO: 5549 - RNA, 21 nt, Artificial Sequence
  Description of Artificial Sequence: Synthetic oligonucleotide
ugccccuugcagcccgauuuu

SEQ ID NO: 5550 - RNA, 21 nt, Artificial Sequence
  Description of Artificial Sequence: Synthetic oligonucleotide
auggcgacacugcccaacauu

SEQ ID NO: 5551 - RNA, 21 nt, Artificial Sequence
  Description of Artificial Sequence: Synthetic oligonucleotide
uguugggcagugucgccauuu

SEQ ID NO: 5552 - RNA, 21 nt, Artificial Sequence
  Description of Artificial Sequence: Synthetic oligonucleotide
uggcgacacugcccaacuauu

SEQ ID NO: 5553 - RNA, 21 nt, Artificial Sequence
  Description of Artificial Sequence: Synthetic oligonucleotide
uaguugggcagugucgccauu

SEQ ID NO: 5554 - RNA, 21 nt, Artificial Sequence
  Description of Artificial Sequence: Synthetic oligonucleotide
auccggaaugcaaagcugauu

SEQ ID NO: 5555 - RNA, 21 nt, Artificial Sequence
  Description of Artificial Sequence: Synthetic oligonucleotide
ucagcuuugcauuccggauuu

SEQ ID NO: 5556 - RNA, 21 nt, Artificial Sequence
  Description of Artificial Sequence: Synthetic oligonucleotide
cccaagucccacccucuuauu

SEQ ID NO: 5557 - RNA, 21 nt, Artificial Sequence
  Description of Artificial Sequence: Synthetic oligonucleotide
uaagagggugggacuuggguu

SEQ ID NO: 5558 - RNA, 21 nt, Artificial Sequence
  Description of Artificial Sequence: Synthetic oligonucleotide
uggugucgagagaucacuauu

SEQ ID NO: 5559 - RNA, 21 nt, Artificial Sequence
  Description of Artificial Sequence: Synthetic oligonucleotide
uagugaucucucgacaccauu

SEQ ID NO: 5560 - RNA, 21 nt, Artificial Sequence
  Description of Artificial Sequence: Synthetic oligonucleotide
ucgagagaucacugaaauauu

SEQ ID NO: 5561 - RNA, 21 nt, Artificial Sequence
  Description of Artificial Sequence: Synthetic oligonucleotide
uauuucagugaucucucgauu

SEQ ID NO: 5562 - RNA, 21 nt, Artificial Sequence
  Description of Artificial Sequence: Synthetic oligonucleotide
cagguuugccacuuugucauu

SEQ ID NO: 5563 - RNA, 21 nt, Artificial Sequence
  Description of Artificial Sequence: Synthetic oligonucleotide
ugacaaaguggcaaaccuguu

SEQ ID NO: 5564 - RNA, 21 nt, Artificial Sequence
  Description of Artificial Sequence: Synthetic oligonucleotide
gcaccuuuucauggucucauu

SEQ ID NO: 5565 - RNA, 21 nt, Artificial Sequence
  Description of Artificial Sequence: Synthetic oligonucleotide
ugagaccaugaaaaggugcuu

SEQ ID NO: 5566 - RNA, 21 nt, Artificial Sequence
  Description of Artificial Sequence: Synthetic oligonucleotide
agcuggagccuuccuaacauu

SEQ ID NO: 5567 - RNA, 21 nt, Artificial Sequence
  Description of Artificial Sequence: Synthetic oligonucleotide
uguuaggaaggcuccagcuuu

SEQ ID NO: 5568 - RNA, 19 nt, Artificial Sequence
  Description of Artificial Sequence: Synthetic oligonucleotide
cuuugagcaagaugggucu

SEQ ID NO: 5569 - RNA, 19 nt, Artificial Sequence
  Description of Artificial Sequence: Synthetic oligonucleotide
gagcaagaugggucucuac

SEQ ID NO: 5570 - RNA, 19 nt, Artificial Sequence
  Description of Artificial Sequence: Synthetic oligonucleotide
agcaagaugggucucuacc

SEQ ID NO: 5571 - RNA, 19 nt, Artificial Sequence
  Description of Artificial Sequence: Synthetic oligonucleotide
caagaugggucucuaccgc

SEQ ID NO: 5572 - RNA, 19 nt, Artificial Sequence
  Description of Artificial Sequence: Synthetic oligonucleotide
aagaugggucucuaccgca

SEQ ID NO: 5573 - RNA, 19 nt, Artificial Sequence
  Description of Artificial Sequence: Synthetic oligonucleotide
agaugggucucuaccgcau

SEQ ID NO: 5574 - RNA, 19 nt, Artificial Sequence
  Description of Artificial Sequence: Synthetic oligonucleotide
gaugggucucuaccgcauc

SEQ ID NO: 5575 - RNA, 19 nt, Artificial Sequence
  Description of Artificial Sequence: Synthetic oligonucleotide
ggucucuaccgcauccgcg

SEQ ID NO: 5576 - RNA, 19 nt, Artificial Sequence
  Description of Artificial Sequence: Synthetic oligonucleotide
cuggucggccagcacgggg

SEQ ID NO: 5577 - RNA, 19 nt, Artificial Sequence
  Description of Artificial Sequence: Synthetic oligonucleotide
uggucggccagcacgggga

SEQ ID NO: 5578 - RNA, 19 nt, Artificial Sequence
  Description of Artificial Sequence: Synthetic oligonucleotide
ggucggccagcacggggag

SEQ ID NO: 5579 - RNA, 19 nt, Artificial Sequence
  Description of Artificial Sequence: Synthetic oligonucleotide
ucgggaagcgacuguggcc

SEQ ID NO: 5580 - RNA, 19 nt, Artificial Sequence
  Description of Artificial Sequence: Synthetic oligonucleotide
ggaagcgacuguggcccgc

SEQ ID NO: 5581 - RNA, 19 nt, Artificial Sequence
  Description of Artificial Sequence: Synthetic oligonucleotide
agcgacuguggcccgcacg

SEQ ID NO: 5582 - RNA, 19 nt, Artificial Sequence
  Description of Artificial Sequence: Synthetic oligonucleotide
cuguggcccgcacggggca

SEQ ID NO: 5583 - RNA, 19 nt, Artificial Sequence
  Description of Artificial Sequence: Synthetic oligonucleotide
uguggcccgcacggggcaa

SEQ ID NO: 5584 - RNA, 19 nt, Artificial Sequence
  Description of Artificial Sequence: Synthetic oligonucleotide
uggcccgcacggggcaagg

SEQ ID NO: 5585 - RNA, 19 nt, Artificial Sequence
  Description of Artificial Sequence: Synthetic oligonucleotide
ccaccugcgauacacccug

SEQ ID NO: 5586 - RNA, 19 nt, Artificial Sequence
  Description of Artificial Sequence: Synthetic oligonucleotide
caccugcgauacacccugg

SEQ ID NO: 5587 - RNA, 19 nt, Artificial Sequence
  Description of Artificial Sequence: Synthetic oligonucleotide
cugcgauacacccuggaaa

SEQ ID NO: 5588 - RNA, 19 nt, Artificial Sequence
  Description of Artificial Sequence: Synthetic oligonucleotide
ugcgauacacccuggaaau

SEQ ID NO: 5589 - RNA, 19 nt, Artificial Sequence
  Description of Artificial Sequence: Synthetic oligonucleotide
uacacccuggaaauuaacg

SEQ ID NO: 5590 - RNA, 19 nt, Artificial Sequence
  Description of Artificial Sequence: Synthetic oligonucleotide
acccuggaaauuaacgucc

SEQ ID NO: 5591 - RNA, 19 nt, Artificial Sequence
  Description of Artificial Sequence: Synthetic oligonucleotide
ccuggaaauuaacguccgg

SEQ ID NO: 5592 - RNA, 19 nt, Artificial Sequence
  Description of Artificial Sequence: Synthetic oligonucleotide
cuggaaauuaacguccggg

SEQ ID NO: 5593 - RNA, 19 nt, Artificial Sequence
  Description of Artificial Sequence: Synthetic oligonucleotide
uggaaauuaacguccgggc

SEQ ID NO: 5594 - RNA, 19 nt, Artificial Sequence
  Description of Artificial Sequence: Synthetic oligonucleotide
ggaaauuaacguccgggcc

SEQ ID NO: 5595 - RNA, 19 nt, Artificial Sequence
  Description of Artificial Sequence: Synthetic oligonucleotide
gaaauuaacguccgggcca

SEQ ID NO: 5596 - RNA, 19 nt, Artificial Sequence
  Description of Artificial Sequence: Synthetic oligonucleotide
aauuaacguccgggccagg

SEQ ID NO: 5597 - RNA, 19 nt, Artificial Sequence
  Description of Artificial Sequence: Synthetic oligonucleotide
uaacguccgggccaggacu

SEQ ID NO: 5598 - RNA, 19 nt, Artificial Sequence
  Description of Artificial Sequence: Synthetic oligonucleotide
aacguccgggccaggacug

SEQ ID NO: 5599 - RNA, 19 nt, Artificial Sequence
  Description of Artificial Sequence: Synthetic oligonucleotide
gugaagucuuccuucuaug

SEQ ID NO: 5600 - RNA, 19 nt, Artificial Sequence
  Description of Artificial Sequence: Synthetic oligonucleotide
ugaagucuuccuucuaugc

SEQ ID NO: 5601 - RNA, 19 nt, Artificial Sequence
  Description of Artificial Sequence: Synthetic oligonucleotide
gaagucuuccuucuaugcc

SEQ ID NO: 5602 - RNA, 19 nt, Artificial Sequence
  Description of Artificial Sequence: Synthetic oligonucleotide
guauguggaaggaaucgug

SEQ ID NO: 5603 - RNA, 19 nt, Artificial Sequence
  Description of Artificial Sequence: Synthetic oligonucleotide
aggaaucgugagucuccac

SEQ ID NO: 5604 - RNA, 19 nt, Artificial Sequence
  Description of Artificial Sequence: Synthetic oligonucleotide
gaaucgugagucuccacua

SEQ ID NO: 5605 - RNA, 19 nt, Artificial Sequence
  Description of Artificial Sequence: Synthetic oligonucleotide
aaucgugagucuccacuau

SEQ ID NO: 5606 - RNA, 19 nt, Artificial Sequence
  Description of Artificial Sequence: Synthetic oligonucleotide
ucgugagucuccacuauaa

SEQ ID NO: 5607 - RNA, 19 nt, Artificial Sequence
  Description of Artificial Sequence: Synthetic oligonucleotide
gugagucuccacuauaaga

SEQ ID NO: 5608 - RNA, 19 nt, Artificial Sequence
  Description of Artificial Sequence: Synthetic oligonucleotide
ugagucuccacuauaagac

SEQ ID NO: 5609 - RNA, 19 nt, Artificial Sequence
  Description of Artificial Sequence: Synthetic oligonucleotide
gcagaccuggugucgagag

SEQ ID NO: 5610 - RNA, 19 nt, Artificial Sequence
  Description of Artificial Sequence: Synthetic oligonucleotide
cagaccuggugucgagaga

SEQ ID NO: 5611 - RNA, 19 nt, Artificial Sequence
  Description of Artificial Sequence: Synthetic oligonucleotide
agaccuggugucgagagau

SEQ ID NO: 5612 - RNA, 19 nt, Artificial Sequence
  Description of Artificial Sequence: Synthetic oligonucleotide
gaccuggugucgagagauc

SEQ ID NO: 5613 - RNA, 19 nt, Artificial Sequence
  Description of Artificial Sequence: Synthetic oligonucleotide
uggugucgagagaucacug

SEQ ID NO: 5614 - RNA, 19 nt, Artificial Sequence
  Description of Artificial Sequence: Synthetic oligonucleotide
ggugucgagagaucacuga

SEQ ID NO: 5615 - RNA, 19 nt, Artificial Sequence
  Description of Artificial Sequence: Synthetic oligonucleotide
ucgagagaucacugaaauc

SEQ ID NO: 5616 - RNA, 19 nt, Artificial Sequence
  Description of Artificial Sequence: Synthetic oligonucleotide
cgagagaucacugaaaucg

SEQ ID NO: 5617 - RNA, 19 nt, Artificial Sequence
  Description of Artificial Sequence: Synthetic oligonucleotide
gagagaucacugaaaucgg

SEQ ID NO: 5618 - RNA, 19 nt, Artificial Sequence
  Description of Artificial Sequence: Synthetic oligonucleotide
agaucacugaaaucgggcu

SEQ ID NO: 5619 - RNA, 19 nt, Artificial Sequence
  Description of Artificial Sequence: Synthetic oligonucleotide
ucacugaaaucgggcugca

SEQ ID NO: 5620 - RNA, 19 nt, Artificial Sequence
  Description of Artificial Sequence: Synthetic oligonucleotide
cacugaaaucgggcugcaa

SEQ ID NO: 5621 - RNA, 19 nt, Artificial Sequence
  Description of Artificial Sequence: Synthetic oligonucleotide
gaaaucgggcugcaagggg

SEQ ID NO: 5622 - RNA, 19 nt, Artificial Sequence
  Description of Artificial Sequence: Synthetic oligonucleotide
aaaucgggcugcaaggggc

SEQ ID NO: 5623 - RNA, 19 nt, Artificial Sequence
  Description of Artificial Sequence: Synthetic oligonucleotide
cagguuugccacuuuguca

SEQ ID NO: 5624 - RNA, 19 nt, Artificial Sequence
  Description of Artificial Sequence: Synthetic oligonucleotide
uguaucuucaccugcaccg

SEQ ID NO: 5625 - RNA, 19 nt, Artificial Sequence
  Description of Artificial Sequence: Synthetic oligonucleotide
guaucuucaccugcaccgg

SEQ ID NO: 5626 - RNA, 19 nt, Artificial Sequence
  Description of Artificial Sequence: Synthetic oligonucleotide
uucaccugcaccggccaac

SEQ ID NO: 5627 - RNA, 19 nt, Artificial Sequence
  Description of Artificial Sequence: Synthetic oligonucleotide
aaccaccaaggaugcaacg

SEQ ID NO: 5628 - RNA, 19 nt, Artificial Sequence
  Description of Artificial Sequence: Synthetic oligonucleotide
ccaccaaggaugcaacgcu

SEQ ID NO: 5629 - RNA, 19 nt, Artificial Sequence
  Description of Artificial Sequence: Synthetic oligonucleotide
ccaaggaugcaacgcugga

SEQ ID NO: 5630 - RNA, 19 nt, Artificial Sequence
  Description of Artificial Sequence: Synthetic oligonucleotide
ggaugcaacgcuggagaca

SEQ ID NO: 5631 - RNA, 19 nt, Artificial Sequence
  Description of Artificial Sequence: Synthetic oligonucleotide
augcaacgcuggagacagu

SEQ ID NO: 5632 - RNA, 19 nt, Artificial Sequence
  Description of Artificial Sequence: Synthetic oligonucleotide
ugcaacgcuggagacagug

SEQ ID NO: 5633 - RNA, 19 nt, Artificial Sequence
  Description of Artificial Sequence: Synthetic oligonucleotide
cagauguccaucacuuggc

SEQ ID NO: 5634 - RNA, 19 nt, Artificial Sequence
  Description of Artificial Sequence: Synthetic oligonucleotide
ggaggaguauuuuucgggc

SEQ ID NO: 5635 - RNA, 19 nt, Artificial Sequence
  Description of Artificial Sequence: Synthetic oligonucleotide
gaggaguauuuuucgggcc

SEQ ID NO: 5636 - RNA, 19 nt, Artificial Sequence
  Description of Artificial Sequence: Synthetic oligonucleotide
uccggaaugcaaagcugga

SEQ ID NO: 5637 - RNA, 19 nt, Artificial Sequence
  Description of Artificial Sequence: Synthetic oligonucleotide
ugcaaagcuggacaugccc

SEQ ID NO: 5638 - RNA, 19 nt, Artificial Sequence
  Description of Artificial Sequence: Synthetic oligonucleotide
gaaaacaguguggccaucu

SEQ ID NO: 5639 - RNA, 19 nt, Artificial Sequence
  Description of Artificial Sequence: Synthetic oligonucleotide
cacccaagccacaagcuga

SEQ ID NO: 5640 - RNA, 19 nt, Artificial Sequence
  Description of Artificial Sequence: Synthetic oligonucleotide
gcaccuuuucauggucucu

SEQ ID NO: 5641 - RNA, 19 nt, Artificial Sequence
  Description of Artificial Sequence: Synthetic oligonucleotide
gaacacauuuuacucuaga

SEQ ID NO: 5642 - RNA, 19 nt, Artificial Sequence
  Description of Artificial Sequence: Synthetic oligonucleotide
uuacucuagaggcaucacc

SEQ ID NO: 5643 - RNA, 19 nt, Artificial Sequence
  Description of Artificial Sequence: Synthetic oligonucleotide
ucuagaggcaucaccuggg

SEQ ID NO: 5644 - RNA, 19 nt, Artificial Sequence
  Description of Artificial Sequence: Synthetic oligonucleotide
ucuucauucagaucuauau

SEQ ID NO: 5645 - RNA, 19 nt, Artificial Sequence
  Description of Artificial Sequence: Synthetic oligonucleotide
gucucuaccgcauccgcgu

SEQ ID NO: 5646 - RNA, 19 nt, Artificial Sequence
  Description of Artificial Sequence: Synthetic oligonucleotide
aagcuggagccuuccuaac

SEQ ID NO: 5647 - RNA, 19 nt, Artificial Sequence
  Description of Artificial Sequence: Synthetic oligonucleotide
agcuggagccuuccuaacc

SEQ ID NO: 5648 - RNA, 19 nt, Artificial Sequence
  Description of Artificial Sequence: Synthetic oligonucleotide
uugggugccuaaugcaccc

SEQ ID NO: 5649 - RNA, 19 nt, Artificial Sequence
  Description of Artificial Sequence: Synthetic oligonucleotide
ugccuaaugcacccugcac

SEQ ID NO: 5650 - RNA, 19 nt, Artificial Sequence
  Description of Artificial Sequence: Synthetic oligonucleotide
guguccacuggggccucgc

SEQ ID NO: 5651 - RNA, 19 nt, Artificial Sequence
  Description of Artificial Sequence: Synthetic oligonucleotide
gauacauccuaucuucaag

SEQ ID NO: 5652 - RNA, 19 nt, Artificial Sequence
  Description of Artificial Sequence: Synthetic oligonucleotide
auuccccaccugcgauaca

SEQ ID NO: 5653 - RNA, 19 nt, Artificial Sequence
  Description of Artificial Sequence: Synthetic oligonucleotide
uuccccaccugcgauacac

SEQ ID NO: 5654 - RNA, 19 nt, Artificial Sequence
  Description of Artificial Sequence: Synthetic oligonucleotide
uuucgaccagauaaugagc

SEQ ID NO: 5655 - RNA, 19 nt, Artificial Sequence
  Description of Artificial Sequence: Synthetic oligonucleotide
ucgaccagauaaugagcac

SEQ ID NO: 5656 - RNA, 19 nt, Artificial Sequence
  Description of Artificial Sequence: Synthetic oligonucleotide
cugcucaagcaagcuggag

SEQ ID NO: 5657 - RNA, 19 nt, Artificial Sequence
  Description of Artificial Sequence: Synthetic oligonucleotide
acugaaaucgggcugcaag

SEQ ID NO: 5658 - RNA, 19 nt, Artificial Sequence
  Description of Artificial Sequence: Synthetic oligonucleotide
ugaaaucgggcugcaaggg

SEQ ID NO: 5659 - RNA, 19 nt, Artificial Sequence
  Description of Artificial Sequence: Synthetic oligonucleotide
aaucgggcugcaaggggcc

SEQ ID NO: 5660 - RNA, 19 nt, Artificial Sequence
  Description of Artificial Sequence: Synthetic oligonucleotide
auggcgacacugcccaacu

SEQ ID NO: 5661 - RNA, 19 nt, Artificial Sequence
  Description of Artificial Sequence: Synthetic oligonucleotide
uggcgacacugcccaacuu

SEQ ID NO: 5662 - RNA, 19 nt, Artificial Sequence
  Description of Artificial Sequence: Synthetic oligonucleotide
auccggaaugcaaagcugg

SEQ ID NO: 5663 - RNA, 19 nt, Artificial Sequence
  Description of Artificial Sequence: Synthetic oligonucleotide
cccaagucccacccucuuc

SEQ ID NO: 5664 - RNA, 19 nt, Artificial Sequence
  Description of Artificial Sequence: Synthetic oligonucleotide
uggugucgagagaucacug

SEQ ID NO: 5665 - RNA, 19 nt, Artificial Sequence
  Description of Artificial Sequence: Synthetic oligonucleotide
ucgagagaucacugaaauc

SEQ ID NO: 5666 - RNA, 19 nt, Artificial Sequence
  Description of Artificial Sequence: Synthetic oligonucleotide
cagguuugccacuuuguca

SEQ ID NO: 5667 - RNA, 19 nt, Artificial Sequence
  Description of Artificial Sequence: Synthetic oligonucleotide
gcaccuuuucauggucucu

SEQ ID NO: 5668 - RNA, 19 nt, Artificial Sequence
  Description of Artificial Sequence: Synthetic oligonucleotide
agcuggagccuuccuaacc

SEQ ID NO: 5669 - RNA, 19 nt, Artificial Sequence
  Description of Artificial Sequence: Synthetic oligonucleotide
agacccaucuugcucaaag

SEQ ID NO: 5670 - RNA, 19 nt, Artificial Sequence
  Description of Artificial Sequence: Synthetic oligonucleotide
guagagacccaucuugcuc

SEQ ID NO: 5671 - RNA, 19 nt, Artificial Sequence
  Description of Artificial Sequence: Synthetic oligonucleotide
gguagagacccaucuugcu

SEQ ID NO: 5672 - RNA, 19 nt, Artificial Sequence
  Description of Artificial Sequence: Synthetic oligonucleotide
gcgguagagacccaucuug

SEQ ID NO: 5673 - RNA, 19 nt, Artificial Sequence
  Description of Artificial Sequence: Synthetic oligonucleotide
ugcgguagagacccaucuu

SEQ ID NO: 5674 - RNA, 19 nt, Artificial Sequence
  Description of Artificial Sequence: Synthetic oligonucleotide
augcgguagagacccaucu

SEQ ID NO: 5675 - RNA, 19 nt, Artificial Sequence
  Description of Artificial Sequence: Synthetic oligonucleotide
gaugcgguagagacccauc

SEQ ID NO: 5676 - RNA, 19 nt, Artificial Sequence
  Description of Artificial Sequence: Synthetic oligonucleotide
cgcggaugcgguagagacc

SEQ ID NO: 5677 - RNA, 19 nt, Artificial Sequence
  Description of Artificial Sequence: Synthetic oligonucleotide
ccccgugcuggccgaccag

SEQ ID NO: 5678 - RNA, 19 nt, Artificial Sequence
  Description of Artificial Sequence: Synthetic oligonucleotide
uccccgugcuggccgacca

SEQ ID NO: 5679 - RNA, 19 nt, Artificial Sequence
  Description of Artificial Sequence: Synthetic oligonucleotide
cuccccgugcuggccgacc

SEQ ID NO: 5680 - RNA, 19 nt, Artificial Sequence
  Description of Artificial Sequence: Synthetic oligonucleotide
ggccacagucgcuucccga

SEQ ID NO: 5681 - RNA, 19 nt, Artificial Sequence
  Description of Artificial Sequence: Synthetic oligonucleotide
gcgggccacagucgcuucc

SEQ ID NO: 5682 - RNA, 19 nt, Artificial Sequence
  Description of Artificial Sequence: Synthetic oligonucleotide
cgugcgggccacagucgcu

SEQ ID NO: 5683 - RNA, 19 nt, Artificial Sequence
  Description of Artificial Sequence: Synthetic oligonucleotide
ugccccgugcgggccacag

SEQ ID NO: 5684 - RNA, 19 nt, Artificial Sequence
  Description of Artificial Sequence: Synthetic oligonucleotide
uugccccgugcgggccaca

SEQ ID NO: 5685 - RNA, 19 nt, Artificial Sequence
  Description of Artificial Sequence: Synthetic oligonucleotide
ccuugccccgugcgggcca

SEQ ID NO: 5686 - RNA, 19 nt, Artificial Sequence
  Description of Artificial Sequence: Synthetic oligonucleotide
caggguguaucgcaggugg

SEQ ID NO: 5687 - RNA, 19 nt, Artificial Sequence
  Description of Artificial Sequence: Synthetic oligonucleotide
ccaggguguaucgcaggug

SEQ ID NO: 5688 - RNA, 19 nt, Artificial Sequence
  Description of Artificial Sequence: Synthetic oligonucleotide
uuuccaggguguaucgcag

SEQ ID NO: 5689 - RNA, 19 nt, Artificial Sequence
  Description of Artificial Sequence: Synthetic oligonucleotide
auuuccaggguguaucgca

SEQ ID NO: 5690 - RNA, 19 nt, Artificial Sequence
  Description of Artificial Sequence: Synthetic oligonucleotide
cguuaauuuccagggugua

SEQ ID NO: 5691 - RNA, 19 nt, Artificial Sequence
  Description of Artificial Sequence: Synthetic oligonucleotide
ggacguuaauuuccagggu

SEQ ID NO: 5692 - RNA, 19 nt, Artificial Sequence
  Description of Artificial Sequence: Synthetic oligonucleotide
ccggacguuaauuuccagg

SEQ ID NO: 5693 - RNA, 19 nt, Artificial Sequence
  Description of Artificial Sequence: Synthetic oligonucleotide
cccggacguuaauuuccag

SEQ ID NO: 5694 - RNA, 19 nt, Artificial Sequence
  Description of Artificial Sequence: Synthetic oligonucleotide
gcccggacguuaauuucca

SEQ ID NO: 5695 - RNA, 19 nt, Artificial Sequence
  Description of Artificial Sequence: Synthetic oligonucleotide
ggcccggacguuaauuucc

SEQ ID NO: 5696 - RNA, 19 nt, Artificial Sequence
  Description of Artificial Sequence: Synthetic oligonucleotide
uggcccggacguuaauuuc

SEQ ID NO: 5697 - RNA, 19 nt, Artificial Sequence
  Description of Artificial Sequence: Synthetic oligonucleotide
ccuggcccggacguuaauu

SEQ ID NO: 5698 - RNA, 19 nt, Artificial Sequence
  Description of Artificial Sequence: Synthetic oligonucleotide
aguccuggcccggacguua

SEQ ID NO: 5699 - RNA, 19 nt, Artificial Sequence
  Description of Artificial Sequence: Synthetic oligonucleotide
caguccuggcccggacguu

SEQ ID NO: 5700 - RNA, 19 nt, Artificial Sequence
  Description of Artificial Sequence: Synthetic oligonucleotide
cauagaaggaagacuucac

SEQ ID NO: 5701 - RNA, 19 nt, Artificial Sequence
  Description of Artificial Sequence: Synthetic oligonucleotide
gcauagaaggaagacuuca

SEQ ID NO: 5702 - RNA, 19 nt, Artificial Sequence
  Description of Artificial Sequence: Synthetic oligonucleotide
ggcauagaaggaagacuuc

SEQ ID NO: 5703 - RNA, 19 nt, Artificial Sequence
  Description of Artificial Sequence: Synthetic oligonucleotide
cacgauuccuuccacauac

SEQ ID NO: 5704 - RNA, 19 nt, Artificial Sequence
  Description of Artificial Sequence: Synthetic oligonucleotide
guggagacucacgauuccu

SEQ ID NO: 5705 - RNA, 19 nt, Artificial Sequence
  Description of Artificial Sequence: Synthetic oligonucleotide
uaguggagacucacgauuc

SEQ ID NO: 5706 - RNA, 19 nt, Artificial Sequence
  Description of Artificial Sequence: Synthetic oligonucleotide
auaguggagacucacgauu

SEQ ID NO: 5707 - RNA, 19 nt, Artificial Sequence
  Description of Artificial Sequence: Synthetic oligonucleotide
uuauaguggagacucacga

SEQ ID NO: 5708 - RNA, 19 nt, Artificial Sequence
  Description of Artificial Sequence: Synthetic oligonucleotide
ucuuauaguggagacucac

SEQ ID NO: 5709 - RNA, 19 nt, Artificial Sequence
  Description of Artificial Sequence: Synthetic oligonucleotide
gucuuauaguggagacuca

SEQ ID NO: 5710 - RNA, 19 nt, Artificial Sequence
  Description of Artificial Sequence: Synthetic oligonucleotide
cucucgacaccaggucugc

SEQ ID NO: 5711 - RNA, 19 nt, Artificial Sequence
  Description of Artificial Sequence: Synthetic oligonucleotide
ucucucgacaccaggucug

SEQ ID NO: 5712 - RNA, 19 nt, Artificial Sequence
  Description of Artificial Sequence: Synthetic oligonucleotide
aucucucgacaccaggucu

SEQ ID NO: 5713 - RNA, 19 nt, Artificial Sequence
  Description of Artificial Sequence: Synthetic oligonucleotide
gaucucucgacaccagguc

SEQ ID NO: 5714 - RNA, 19 nt, Artificial Sequence
  Description of Artificial Sequence: Synthetic oligonucleotide
cagugaucucucgacacca

SEQ ID NO: 5715 - RNA, 19 nt, Artificial Sequence
  Description of Artificial Sequence: Synthetic oligonucleotide
ucagugaucucucgacacc

SEQ ID NO: 5716 - RNA, 19 nt, Artificial Sequence
  Description of Artificial Sequence: Synthetic oligonucleotide
gauuucagugaucucucga

SEQ ID NO: 5717 - RNA, 19 nt, Artificial Sequence
  Description of Artificial Sequence: Synthetic oligonucleotide
cgauuucagugaucucucg

SEQ ID NO: 5718 - RNA, 19 nt, Artificial Sequence
  Description of Artificial Sequence: Synthetic oligonucleotide
ccgauuucagugaucucuc

SEQ ID NO: 5719 - RNA, 19 nt, Artificial Sequence
  Description of Artificial Sequence: Synthetic oligonucleotide
agcccgauuucagugaucu

SEQ ID NO: 5720 - RNA, 19 nt, Artificial Sequence
  Description of Artificial Sequence: Synthetic oligonucleotide
ugcagcccgauuucaguga

SEQ ID NO: 5721 - RNA, 19 nt, Artificial Sequence
  Description of Artificial Sequence: Synthetic oligonucleotide
uugcagcccgauuucagug

SEQ ID NO: 5722 - RNA, 19 nt, Artificial Sequence
  Description of Artificial Sequence: Synthetic oligonucleotide
ccccuugcagcccgauuuc

SEQ ID NO: 5723 - RNA, 19 nt, Artificial Sequence
  Description of Artificial Sequence: Synthetic oligonucleotide
gccccuugcagcccgauuu

SEQ ID NO: 5724 - RNA, 19 nt, Artificial Sequence
  Description of Artificial Sequence: Synthetic oligonucleotide
ugacaaaguggcaaaccug

SEQ ID NO: 5725 - RNA, 19 nt, Artificial Sequence
  Description of Artificial Sequence: Synthetic oligonucleotide
cggugcaggugaagauaca

SEQ ID NO: 5726 - RNA, 19 nt, Artificial Sequence
  Description of Artificial Sequence: Synthetic oligonucleotide
ccggugcaggugaagauac

SEQ ID NO: 5727 - RNA, 19 nt, Artificial Sequence
  Description of Artificial Sequence: Synthetic oligonucleotide
guuggccggugcaggugaa

SEQ ID NO: 5728 - RNA, 19 nt, Artificial Sequence
  Description of Artificial Sequence: Synthetic oligonucleotide
cguugcauccuuggugguu

SEQ ID NO: 5729 - RNA, 19 nt, Artificial Sequence
  Description of Artificial Sequence: Synthetic oligonucleotide
agcguugcauccuuggugg

SEQ ID NO: 5730 - RNA, 19 nt, Artificial Sequence
  Description of Artificial Sequence: Synthetic oligonucleotide
uccagcguugcauccuugg

SEQ ID NO: 5731 - RNA, 19 nt, Artificial Sequence
  Description of Artificial Sequence: Synthetic oligonucleotide
ugucuccagcguugcaucc

SEQ ID NO: 5732 - RNA, 19 nt, Artificial Sequence
  Description of Artificial Sequence: Synthetic oligonucleotide
acugucuccagcguugcau

SEQ ID NO: 5733 - RNA, 19 nt, Artificial Sequence
  Description of Artificial Sequence: Synthetic oligonucleotide
cacugucuccagcguugca

SEQ ID NO: 5734 - RNA, 19 nt, Artificial Sequence
  Description of Artificial Sequence: Synthetic oligonucleotide
gccaagugauggacaucug

SEQ ID NO: 5735 - RNA, 19 nt, Artificial Sequence
  Description of Artificial Sequence: Synthetic oligonucleotide
gcccgaaaaauacuccucc

SEQ ID NO: 5736 - RNA, 19 nt, Artificial Sequence
  Description of Artificial Sequence: Synthetic oligonucleotide
ggcccgaaaaauacuccuc

SEQ ID NO: 5737 - RNA, 19 nt, Artificial Sequence
  Description of Artificial Sequence: Synthetic oligonucleotide
uccagcuuugcauuccgga

SEQ ID NO: 5738 - RNA, 19 nt, Artificial Sequence
  Description of Artificial Sequence: Synthetic oligonucleotide
gggcauguccagcuuugca

SEQ ID NO: 5739 - RNA, 19 nt, Artificial Sequence
  Description of Artificial Sequence: Synthetic oligonucleotide
agauggccacacuguuuuc

SEQ ID NO: 5740 - RNA, 19 nt, Artificial Sequence
  Description of Artificial Sequence: Synthetic oligonucleotide
ucagcuuguggcuugggug

SEQ ID NO: 5741 - RNA, 19 nt, Artificial Sequence
  Description of Artificial Sequence: Synthetic oligonucleotide
agagaccaugaaaaggugc

SEQ ID NO: 5742 - RNA, 19 nt, Artificial Sequence
  Description of Artificial Sequence: Synthetic oligonucleotide
ucuagaguaaaauguguuc

SEQ ID NO: 5743 - RNA, 19 nt, Artificial Sequence
  Description of Artificial Sequence: Synthetic oligonucleotide
ggugaugccucuagaguaa

SEQ ID NO: 5744 - RNA, 19 nt, Artificial Sequence
  Description of Artificial Sequence: Synthetic oligonucleotide
cccaggugaugccucuaga

SEQ ID NO: 5745 - RNA, 19 nt, Artificial Sequence
  Description of Artificial Sequence: Synthetic oligonucleotide
auauagaucugaaugaaga

SEQ ID NO: 5746 - RNA, 19 nt, Artificial Sequence
  Description of Artificial Sequence: Synthetic oligonucleotide
acgcggaugcgguagagac

SEQ ID NO: 5747 - RNA, 19 nt, Artificial Sequence
  Description of Artificial Sequence: Synthetic oligonucleotide
guuaggaaggcuccagcuu

SEQ ID NO: 5748 - RNA, 19 nt, Artificial Sequence
  Description of Artificial Sequence: Synthetic oligonucleotide
gguuaggaaggcuccagcu

SEQ ID NO: 5749 - RNA, 19 nt, Artificial Sequence
  Description of Artificial Sequence: Synthetic oligonucleotide
gggugcauuaggcacccaa

SEQ ID NO: 5750 - RNA, 19 nt, Artificial Sequence
  Description of Artificial Sequence: Synthetic oligonucleotide
gugcagggugcauuaggca

SEQ ID NO: 5751 - RNA, 19 nt, Artificial Sequence
  Description of Artificial Sequence: Synthetic oligonucleotide
gcgaggccccaguggacac

SEQ ID NO: 5752 - RNA, 19 nt, Artificial Sequence
  Description of Artificial Sequence: Synthetic oligonucleotide
cuugaagauaggauguauc

SEQ ID NO: 5753 - RNA, 19 nt, Artificial Sequence
  Description of Artificial Sequence: Synthetic oligonucleotide
uguaucgcagguggggaau

SEQ ID NO: 5754 - RNA, 19 nt, Artificial Sequence
  Description of Artificial Sequence: Synthetic oligonucleotide
guguaucgcagguggggaa

SEQ ID NO: 5755 - RNA, 19 nt, Artificial Sequence
  Description of Artificial Sequence: Synthetic oligonucleotide
gcucauuaucuggucgaaa

SEQ ID NO: 5756 - RNA, 19 nt, Artificial Sequence
  Description of Artificial Sequence: Synthetic oligonucleotide
gugcucauuaucuggucga

SEQ ID NO: 5757 - RNA, 19 nt, Artificial Sequence
  Description of Artificial Sequence: Synthetic oligonucleotide
cuccagcuugcuugagcag

SEQ ID NO: 5758 - RNA, 19 nt, Artificial Sequence
  Description of Artificial Sequence: Synthetic oligonucleotide
cuugcagcccgauuucagu

SEQ ID NO: 5759 - RNA, 19 nt, Artificial Sequence
  Description of Artificial Sequence: Synthetic oligonucleotide
cccuugcagcccgauuuca

SEQ ID NO: 5760 - RNA, 19 nt, Artificial Sequence
  Description of Artificial Sequence: Synthetic oligonucleotide
ggccccuugcagcccgauu

SEQ ID NO: 5761 - RNA, 19 nt, Artificial Sequence
  Description of Artificial Sequence: Synthetic oligonucleotide
aguugggcagugucgccau

SEQ ID NO: 5762 - RNA, 19 nt, Artificial Sequence
  Description of Artificial Sequence: Synthetic oligonucleotide
aaguugggcagugucgcca

SEQ ID NO: 5763 - RNA, 19 nt, Artificial Sequence
  Description of Artificial Sequence: Synthetic oligonucleotide
ccagcuuugcauuccggau

SEQ ID NO: 5764 - RNA, 19 nt, Artificial Sequence
  Description of Artificial Sequence: Synthetic oligonucleotide
gaagagggugggacuuggg

SEQ ID NO: 5765 - RNA, 19 nt, Artificial Sequence
  Description of Artificial Sequence: Synthetic oligonucleotide
cagugaucucucgacacca

SEQ ID NO: 5766 - RNA, 19 nt, Artificial Sequence
  Description of Artificial Sequence: Synthetic oligonucleotide
gauuucagugaucucucga

SEQ ID NO: 5767 - RNA, 19 nt, Artificial Sequence
  Description of Artificial Sequence: Synthetic oligonucleotide
ugacaaaguggcaaaccug

SEQ ID NO: 5768 - RNA, 19 nt, Artificial Sequence
  Description of Artificial Sequence: Synthetic oligonucleotide
agagaccaugaaaaggugc

SEQ ID NO: 5769 - RNA, 19 nt, Artificial Sequence
  Description of Artificial Sequence: Synthetic oligonucleotide
gguuaggaaggcuccagcu

SEQ ID NO: 5770 - RNA, 19 nt, Artificial Sequence
  Description of Artificial Sequence: Synthetic oligonucleotide
cuuugagcaagauggguca

SEQ ID NO: 5771 - RNA, 19 nt, Artificial Sequence
  Description of Artificial Sequence: Synthetic oligonucleotide
gagcaagaugggucucuaa

SEQ ID NO: 5772 - RNA, 19 nt, Artificial Sequence
  Description of Artificial Sequence: Synthetic oligonucleotide
agcaagaugggucucuaca

SEQ ID NO: 5773 - RNA, 19 nt, Artificial Sequence
  Description of Artificial Sequence: Synthetic oligonucleotide
caagaugggucucuaccga

SEQ ID NO: 5774 - RNA, 19 nt, Artificial Sequence
  Description of Artificial Sequence: Synthetic oligonucleotide
aagaugggucucuaccgca

SEQ ID NO: 5775 - RNA, 19 nt, Artificial Sequence
  Description of Artificial Sequence: Synthetic oligonucleotide
agaugggucucuaccgcaa

SEQ ID NO: 5776 - RNA, 19 nt, Artificial Sequence
  Description of Artificial Sequence: Synthetic oligonucleotide
gaugggucucuaccgcaua

SEQ ID NO: 5777 - RNA, 19 nt, Artificial Sequence
  Description of Artificial Sequence: Synthetic oligonucleotide
ggucucuaccgcauccgca

SEQ ID NO: 5778 - RNA, 19 nt, Artificial Sequence
  Description of Artificial Sequence: Synthetic oligonucleotide
cuggucggccagcacggga

SEQ ID NO: 5779 - RNA, 19 nt, Artificial Sequence
  Description of Artificial Sequence: Synthetic oligonucleotide
uggucggccagcacgggga

SEQ ID NO: 5780 - RNA, 19 nt, Artificial Sequence
  Description of Artificial Sequence: Synthetic oligonucleotide
ggucggccagcacggggaa

SEQ ID NO: 5781 - RNA, 19 nt, Artificial Sequence
  Description of Artificial Sequence: Synthetic oligonucleotide
ucgggaagcgacuguggca

SEQ ID NO: 5782 - RNA, 19 nt, Artificial Sequence
  Description of Artificial Sequence: Synthetic oligonucleotide
ggaagcgacuguggcccga

SEQ ID NO: 5783 - RNA, 19 nt, Artificial Sequence
  Description of Artificial Sequence: Synthetic oligonucleotide
agcgacuguggcccgcaca

SEQ ID NO: 5784 - RNA, 19 nt, Artificial Sequence
  Description of Artificial Sequence: Synthetic oligonucleotide
cuguggcccgcacggggca

SEQ ID NO: 5785 - RNA, 19 nt, Artificial Sequence
  Description of Artificial Sequence: Synthetic oligonucleotide
uguggcccgcacggggcaa

SEQ ID NO: 5786 - RNA, 19 nt, Artificial Sequence
  Description of Artificial Sequence: Synthetic oligonucleotide
uggcccgcacggggcaaga

SEQ ID NO: 5787 - RNA, 19 nt, Artificial Sequence
  Description of Artificial Sequence: Synthetic oligonucleotide
ccaccugcgauacacccua

SEQ ID NO: 5788 - RNA, 19 nt, Artificial Sequence
  Description of Artificial Sequence: Synthetic oligonucleotide
caccugcgauacacccuga

SEQ ID NO: 5789 - RNA, 19 nt, Artificial Sequence
  Description of Artificial Sequence: Synthetic oligonucleotide
cugcgauacacccuggaaa

SEQ ID NO: 5790 - RNA, 19 nt, Artificial Sequence
  Description of Artificial Sequence: Synthetic oligonucleotide
ugcgauacacccuggaaaa

SEQ ID NO: 5791 - RNA, 19 nt, Artificial Sequence
  Description of Artificial Sequence: Synthetic oligonucleotide
uacacccuggaaauuaaca

SEQ ID NO: 5792 - RNA, 19 nt, Artificial Sequence
  Description of Artificial Sequence: Synthetic oligonucleotide
acccuggaaauuaacguca

SEQ ID NO: 5793 - RNA, 19 nt, Artificial Sequence
  Description of Artificial Sequence: Synthetic oligonucleotide
ccuggaaauuaacguccga

SEQ ID NO: 5794 - RNA, 19 nt, Artificial Sequence
  Description of Artificial Sequence: Synthetic oligonucleotide
cuggaaauuaacguccgga

SEQ ID NO: 5795 - RNA, 19 nt, Artificial Sequence
  Description of Artificial Sequence: Synthetic oligonucleotide
uggaaauuaacguccggga

SEQ ID NO: 5796 - RNA, 19 nt, Artificial Sequence
  Description of Artificial Sequence: Synthetic oligonucleotide
ggaaauuaacguccgggca

SEQ ID NO: 5797 - RNA, 19 nt, Artificial Sequence
  Description of Artificial Sequence: Synthetic oligonucleotide
gaaauuaacguccgggcca

SEQ ID NO: 5798 - RNA, 19 nt, Artificial Sequence
  Description of Artificial Sequence: Synthetic oligonucleotide
aauuaacguccgggccaga

SEQ ID NO: 5799 - RNA, 19 nt, Artificial Sequence
  Description of Artificial Sequence: Synthetic oligonucleotide
uaacguccgggccaggaca

SEQ ID NO: 5800 - RNA, 19 nt, Artificial Sequence
  Description of Artificial Sequence: Synthetic oligonucleotide
aacguccgggccaggacua

SEQ ID NO: 5801 - RNA, 19 nt, Artificial Sequence
  Description of Artificial Sequence: Synthetic oligonucleotide
gugaagucuuccuucuaua

SEQ ID NO: 5802 - RNA, 19 nt, Artificial Sequence
  Description of Artificial Sequence: Synthetic oligonucleotide
ugaagucuuccuucuauga

SEQ ID NO: 5803 - RNA, 19 nt, Artificial Sequence
  Description of Artificial Sequence: Synthetic oligonucleotide
gaagucuuccuucuaugca

SEQ ID NO: 5804 - RNA, 19 nt, Artificial Sequence
  Description of Artificial Sequence: Synthetic oligonucleotide
guauguggaaggaaucgua

SEQ ID NO: 5805 - RNA, 19 nt, Artificial Sequence
  Description of Artificial Sequence: Synthetic oligonucleotide
aggaaucgugagucuccaa

SEQ ID NO: 5806 - RNA, 19 nt, Artificial Sequence
  Description of Artificial Sequence: Synthetic oligonucleotide
gaaucgugagucuccacua

SEQ ID NO: 5807 - RNA, 19 nt, Artificial Sequence
  Description of Artificial Sequence: Synthetic oligonucleotide
aaucgugagucuccacuaa

SEQ ID NO: 5808 - RNA, 19 nt, Artificial Sequence
  Description of Artificial Sequence: Synthetic oligonucleotide
ucgugagucuccacuauaa

SEQ ID NO: 5809 - RNA, 19 nt, Artificial Sequence
  Description of Artificial Sequence: Synthetic oligonucleotide
gugagucuccacuauaaga

SEQ ID NO: 5810 - RNA, 19 nt, Artificial Sequence
  Description of Artificial Sequence: Synthetic oligonucleotide
ugagucuccacuauaagaa

SEQ ID NO: 5811 - RNA, 19 nt, Artificial Sequence
  Description of Artificial Sequence: Synthetic oligonucleotide
gcagaccuggugucgagaa

SEQ ID NO: 5812 - RNA, 19 nt, Artificial Sequence
  Description of Artificial Sequence: Synthetic oligonucleotide
cagaccuggugucgagaga

SEQ ID NO: 5813 - RNA, 19 nt, Artificial Sequence
  Description of Artificial Sequence: Synthetic oligonucleotide
agaccuggugucgagagaa

SEQ ID NO: 5814 - RNA, 19 nt, Artificial Sequence
  Description of Artificial Sequence: Synthetic oligonucleotide
gaccuggugucgagagaua

SEQ ID NO: 5815 - RNA, 19 nt, Artificial Sequence
  Description of Artificial Sequence: Synthetic oligonucleotide
uggugucgagagaucacua

SEQ ID NO: 5816 - RNA, 19 nt, Artificial Sequence
  Description of Artificial Sequence: Synthetic oligonucleotide
ggugucgagagaucacuga

SEQ ID NO: 5817 - RNA, 19 nt, Artificial Sequence
  Description of Artificial Sequence: Synthetic oligonucleotide
ucgagagaucacugaaaua

SEQ ID NO: 5818 - RNA, 19 nt, Artificial Sequence
  Description of Artificial Sequence: Synthetic oligonucleotide
cgagagaucacugaaauca

SEQ ID NO: 5819 - RNA, 19 nt, Artificial Sequence
  Description of Artificial Sequence: Synthetic oligonucleotide
gagagaucacugaaaucga

SEQ ID NO: 5820 - RNA, 19 nt, Artificial Sequence
  Description of Artificial Sequence: Synthetic oligonucleotide
agaucacugaaaucgggca

SEQ ID NO: 5821 - RNA, 19 nt, Artificial Sequence
  Description of Artificial Sequence: Synthetic oligonucleotide
ucacugaaaucgggcugca

SEQ ID NO: 5822 - RNA, 19 nt, Artificial Sequence
  Description of Artificial Sequence: Synthetic oligonucleotide
cacugaaaucgggcugcaa

SEQ ID NO: 5823 - RNA, 19 nt, Artificial Sequence
  Description of Artificial Sequence: Synthetic oligonucleotide
gaaaucgggcugcaaggga

SEQ ID NO: 5824 - RNA, 19 nt, Artificial Sequence
  Description of Artificial Sequence: Synthetic oligonucleotide
aaaucgggcugcaagggga

SEQ ID NO: 5825 - RNA, 19 nt, Artificial Sequence
  Description of Artificial Sequence: Synthetic oligonucleotide
cagguuugccacuuuguca

SEQ ID NO: 5826 - RNA, 19 nt, Artificial Sequence
  Description of Artificial Sequence: Synthetic oligonucleotide
uguaucuucaccugcacca

SEQ ID NO: 5827 - RNA, 19 nt, Artificial Sequence
  Description of Artificial Sequence: Synthetic oligonucleotide
guaucuucaccugcaccga

SEQ ID NO: 5828 - RNA, 19 nt, Artificial Sequence
  Description of Artificial Sequence: Synthetic oligonucleotide
uucaccugcaccggccaaa

SEQ ID NO: 5829 - RNA, 19 nt, Artificial Sequence
  Description of Artificial Sequence: Synthetic oligonucleotide
aaccaccaaggaugcaaca

SEQ ID NO: 5830 - RNA, 19 nt, Artificial Sequence
  Description of Artificial Sequence: Synthetic oligonucleotide
ccaccaaggaugcaacgca

SEQ ID NO: 5831 - RNA, 19 nt, Artificial Sequence
  Description of Artificial Sequence: Synthetic oligonucleotide
ccaaggaugcaacgcugga

SEQ ID NO: 5832 - RNA, 19 nt, Artificial Sequence
  Description of Artificial Sequence: Synthetic oligonucleotide
ggaugcaacgcuggagaca

SEQ ID NO: 5833 - RNA, 19 nt, Artificial Sequence
  Description of Artificial Sequence: Synthetic oligonucleotide
augcaacgcuggagacaga

SEQ ID NO: 5834 - RNA, 19 nt, Artificial Sequence
  Description of Artificial Sequence: Synthetic oligonucleotide
ugcaacgcuggagacagua

SEQ ID NO: 5835 - RNA, 19 nt, Artificial Sequence
  Description of Artificial Sequence: Synthetic oligonucleotide
cagauguccaucacuugga

SEQ ID NO: 5836 - RNA, 19 nt, Artificial Sequence
  Description of Artificial Sequence: Synthetic oligonucleotide
ggaggaguauuuuucggga

SEQ ID NO: 5837 - RNA, 19 nt, Artificial Sequence
  Description of Artificial Sequence: Synthetic oligonucleotide
gaggaguauuuuucgggca

SEQ ID NO: 5838 - RNA, 19 nt, Artificial Sequence
  Description of Artificial Sequence: Synthetic oligonucleotide
uccggaaugcaaagcugga

SEQ ID NO: 5839 - RNA, 19 nt, Artificial Sequence
  Description of Artificial Sequence: Synthetic oligonucleotide
ugcaaagcuggacaugcca

SEQ ID NO: 5840 - RNA, 19 nt, Artificial Sequence
  Description of Artificial Sequence: Synthetic oligonucleotide
gaaaacaguguggccauca

SEQ ID NO: 5841 - RNA, 19 nt, Artificial Sequence
  Description of Artificial Sequence: Synthetic oligonucleotide
cacccaagccacaagcuga

SEQ ID NO: 5842 - RNA, 19 nt, Artificial Sequence
  Description of Artificial Sequence: Synthetic oligonucleotide
gcaccuuuucauggucuca

SEQ ID NO: 5843 - RNA, 19 nt, Artificial Sequence
  Description of Artificial Sequence: Synthetic oligonucleotide
gaacacauuuuacucuaga

SEQ ID NO: 5844 - RNA, 19 nt, Artificial Sequence
  Description of Artificial Sequence: Synthetic oligonucleotide
uuacucuagaggcaucaca

SEQ ID NO: 5845 - RNA, 19 nt, Artificial Sequence
  Description of Artificial Sequence: Synthetic oligonucleotide
ucuagaggcaucaccugga

SEQ ID NO: 5846 - RNA, 19 nt, Artificial Sequence
  Description of Artificial Sequence: Synthetic oligonucleotide
ucuucauucagaucuauaa

SEQ ID NO: 5847 - RNA, 19 nt, Artificial Sequence
  Description of Artificial Sequence: Synthetic oligonucleotide
gucucuaccgcauccgcga

SEQ ID NO: 5848 - RNA, 19 nt, Artificial Sequence
  Description of Artificial Sequence: Synthetic oligonucleotide
aagcuggagccuuccuaaa

SEQ ID NO: 5849 - RNA, 19 nt, Artificial Sequence
  Description of Artificial Sequence: Synthetic oligonucleotide
agcuggagccuuccuaaca

SEQ ID NO: 5850 - RNA, 19 nt, Artificial Sequence
  Description of Artificial Sequence: Synthetic oligonucleotide
uugggugccuaaugcacca

SEQ ID NO: 5851 - RNA, 19 nt, Artificial Sequence
  Description of Artificial Sequence: Synthetic oligonucleotide
ugccuaaugcacccugcaa

SEQ ID NO: 5852 - RNA, 19 nt, Artificial Sequence
  Description of Artificial Sequence: Synthetic oligonucleotide
guguccacuggggccucga

SEQ ID NO: 5853 - RNA, 19 nt, Artificial Sequence
  Description of Artificial Sequence: Synthetic oligonucleotide
gauacauccuaucuucaaa

SEQ ID NO: 5854 - RNA, 19 nt, Artificial Sequence
  Description of Artificial Sequence: Synthetic oligonucleotide
auuccccaccugcgauaca

SEQ ID NO: 5855 - RNA, 19 nt, Artificial Sequence
  Description of Artificial Sequence: Synthetic oligonucleotide
uuccccaccugcgauacaa

SEQ ID NO: 5856 - RNA, 19 nt, Artificial Sequence
  Description of Artificial Sequence: Synthetic oligonucleotide
uuucgaccagauaaugaga

SEQ ID NO: 5857 - RNA, 19 nt, Artificial Sequence
  Description of Artificial Sequence: Synthetic oligonucleotide
ucgaccagauaaugagcaa

SEQ ID NO: 5858 - RNA, 19 nt, Artificial Sequence
  Description of Artificial Sequence: Synthetic oligonucleotide
cugcucaagcaagcuggaa

SEQ ID NO: 5859 - RNA, 19 nt, Artificial Sequence
  Description of Artificial Sequence: Synthetic oligonucleotide
acugaaaucgggcugcaaa

SEQ ID NO: 5860 - RNA, 19 nt, Artificial Sequence
  Description of Artificial Sequence: Synthetic oligonucleotide
ugaaaucgggcugcaagga

SEQ ID NO: 5861 - RNA, 19 nt, Artificial Sequence
  Description of Artificial Sequence: Synthetic oligonucleotide
aaucgggcugcaaggggca

SEQ ID NO: 5862 - RNA, 19 nt, Artificial Sequence
  Description of Artificial Sequence: Synthetic oligonucleotide
auggcgacacugcccaaca

SEQ ID NO: 5863 - RNA, 19 nt, Artificial Sequence
  Description of Artificial Sequence: Synthetic oligonucleotide
uggcgacacugcccaacua

SEQ ID NO: 5864 - RNA, 19 nt, Artificial Sequence
  Description of Artificial Sequence: Synthetic oligonucleotide
auccggaaugcaaagcuga

SEQ ID NO: 5865 - RNA, 19 nt, Artificial Sequence
  Description of Artificial Sequence: Synthetic oligonucleotide
cccaagucccacccucuua

SEQ ID NO: 5866 - RNA, 19 nt, Artificial Sequence
  Description of Artificial Sequence: Synthetic oligonucleotide
uggugucgagagaucacua

SEQ ID NO: 5867 - RNA, 19 nt, Artificial Sequence
  Description of Artificial Sequence: Synthetic oligonucleotide
ucgagagaucacugaaaua

SEQ ID NO: 5868 - RNA, 19 nt, Artificial Sequence
  Description of Artificial Sequence: Synthetic oligonucleotide
cagguuugccacuuuguca

SEQ ID NO: 5869 - RNA, 19 nt, Artificial Sequence
  Description of Artificial Sequence: Synthetic oligonucleotide
gcaccuuuucauggucuca

SEQ ID NO: 5870 - RNA, 19 nt, Artificial Sequence
  Description of Artificial Sequence: Synthetic oligonucleotide
agcuggagccuuccuaaca

SEQ ID NO: 5871 - RNA, 19 nt, Artificial Sequence
  Description of Artificial Sequence: Synthetic oligonucleotide
ugacccaucuugcucaaag

SEQ ID NO: 5872 - RNA, 19 nt, Artificial Sequence
  Description of Artificial Sequence: Synthetic oligonucleotide
uuagagacccaucuugcuc

SEQ ID NO: 5873 - RNA, 19 nt, Artificial Sequence
  Description of Artificial Sequence: Synthetic oligonucleotide
uguagagacccaucuugcu

SEQ ID NO: 5874 - RNA, 19 nt, Artificial Sequence
  Description of Artificial Sequence: Synthetic oligonucleotide
ucgguagagacccaucuug

SEQ ID NO: 5875 - RNA, 19 nt, Artificial Sequence
  Description of Artificial Sequence: Synthetic oligonucleotide
ugcgguagagacccaucuu

SEQ ID NO: 5876 - RNA, 19 nt, Artificial Sequence
  Description of Artificial Sequence: Synthetic oligonucleotide
uugcgguagagacccaucu

SEQ ID NO: 5877 - RNA, 19 nt, Artificial Sequence
  Description of Artificial Sequence: Synthetic oligonucleotide
uaugcgguagagacccauc

SEQ ID NO: 5878 - RNA, 19 nt, Artificial Sequence
  Description of Artificial Sequence: Synthetic oligonucleotide
ugcggaugcgguagagacc

SEQ ID NO: 5879 - RNA, 19 nt, Artificial Sequence
  Description of Artificial Sequence: Synthetic oligonucleotide
ucccgugcuggccgaccag

SEQ ID NO: 5880 - RNA, 19 nt, Artificial Sequence
  Description of Artificial Sequence: Synthetic oligonucleotide
uccccgugcuggccgacca

SEQ ID NO: 5881 - RNA, 19 nt, Artificial Sequence
  Description of Artificial Sequence: Synthetic oligonucleotide
uuccccgugcuggccgacc

SEQ ID NO: 5882 - RNA, 19 nt, Artificial Sequence
  Description of Artificial Sequence: Synthetic oligonucleotide
ugccacagucgcuucccga

SEQ ID NO: 5883 - RNA, 19 nt, Artificial Sequence
  Description of Artificial Sequence: Synthetic oligonucleotide
ucgggccacagucgcuucc

SEQ ID NO: 5884 - RNA, 19 nt, Artificial Sequence
  Description of Artificial Sequence: Synthetic oligonucleotide
ugugcgggccacagucgcu

SEQ ID NO: 5885 - RNA, 19 nt, Artificial Sequence
  Description of Artificial Sequence: Synthetic oligonucleotide
ugccccgugcgggccacag

SEQ ID NO: 5886 - RNA, 19 nt, Artificial Sequence
  Description of Artificial Sequence: Synthetic oligonucleotide
uugccccgugcgggccaca

SEQ ID NO: 5887 - RNA, 19 nt, Artificial Sequence
  Description of Artificial Sequence: Synthetic oligonucleotide
ucuugccccgugcgggcca

SEQ ID NO: 5888 - RNA, 19 nt, Artificial Sequence
  Description of Artificial Sequence: Synthetic oligonucleotide
uaggguguaucgcaggugg

SEQ ID NO: 5889 - RNA, 19 nt, Artificial Sequence
  Description of Artificial Sequence: Synthetic oligonucleotide
ucaggguguaucgcaggug

SEQ ID NO: 5890 - RNA, 19 nt, Artificial Sequence
  Description of Artificial Sequence: Synthetic oligonucleotide
uuuccaggguguaucgcag

SEQ ID NO: 5891 - RNA, 19 nt, Artificial Sequence
  Description of Artificial Sequence: Synthetic oligonucleotide
uuuuccaggguguaucgca

SEQ ID NO: 5892 - RNA, 19 nt, Artificial Sequence
  Description of Artificial Sequence: Synthetic oligonucleotide
uguuaauuuccagggugua

SEQ ID NO: 5893 - RNA, 19 nt, Artificial Sequence
  Description of Artificial Sequence: Synthetic oligonucleotide
ugacguuaauuuccagggu

SEQ ID NO: 5894 - RNA, 19 nt, Artificial Sequence
  Description of Artificial Sequence: Synthetic oligonucleotide
ucggacguuaauuuccagg

SEQ ID NO: 5895 - RNA, 19 nt, Artificial Sequence
  Description of Artificial Sequence: Synthetic oligonucleotide
uccggacguuaauuuccag

SEQ ID NO: 5896 - RNA, 19 nt, Artificial Sequence
  Description of Artificial Sequence: Synthetic oligonucleotide
ucccggacguuaauuucca

SEQ ID NO: 5897 - RNA, 19 nt, Artificial Sequence
  Description of Artificial Sequence: Synthetic oligonucleotide
ugcccggacguuaauuucc

SEQ ID NO: 5898 - RNA, 19 nt, Artificial Sequence
  Description of Artificial Sequence: Synthetic oligonucleotide
uggcccggacguuaauuuc

SEQ ID NO: 5899 - RNA, 19 nt, Artificial Sequence
  Description of Artificial Sequence: Synthetic oligonucleotide
ucuggcccggacguuaauu

SEQ ID NO: 5900 - RNA, 19 nt, Artificial Sequence
  Description of Artificial Sequence: Synthetic oligonucleotide
uguccuggcccggacguua

SEQ ID NO: 5901 - RNA, 19 nt, Artificial Sequence
  Description of Artificial Sequence: Synthetic oligonucleotide
uaguccuggcccggacguu

SEQ ID NO: 5902 - RNA, 19 nt, Artificial Sequence
  Description of Artificial Sequence: Synthetic oligonucleotide
uauagaaggaagacuucac

SEQ ID NO: 5903 - RNA, 19 nt, Artificial Sequence
  Description of Artificial Sequence: Synthetic oligonucleotide
ucauagaaggaagacuuca

SEQ ID NO: 5904 - RNA, 19 nt, Artificial Sequence
  Description of Artificial Sequence: Synthetic oligonucleotide
ugcauagaaggaagacuuc

SEQ ID NO: 5905 - RNA, 19 nt, Artificial Sequence
  Description of Artificial Sequence: Synthetic oligonucleotide
uacgauuccuuccacauac

SEQ ID NO: 5906 - RNA, 19 nt, Artificial Sequence
  Description of Artificial Sequence: Synthetic oligonucleotide
uuggagacucacgauuccu

SEQ ID NO: 5907 - RNA, 19 nt, Artificial Sequence
  Description of Artificial Sequence: Synthetic oligonucleotide
uaguggagacucacgauuc

SEQ ID NO: 5908 - RNA, 19 nt, Artificial Sequence
  Description of Artificial Sequence: Synthetic oligonucleotide
uuaguggagacucacgauu

SEQ ID NO: 5909 - RNA, 19 nt, Artificial Sequence
  Description of Artificial Sequence: Synthetic oligonucleotide
uuauaguggagacucacga

SEQ ID NO: 5910 - RNA, 19 nt, Artificial Sequence
  Description of Artificial Sequence: Synthetic oligonucleotide
ucuuauaguggagacucac

SEQ ID NO: 5911 - RNA, 19 nt, Artificial Sequence
  Description of Artificial Sequence: Synthetic oligonucleotide
uucuuauaguggagacuca

SEQ ID NO: 5912 - RNA, 19 nt, Artificial Sequence
  Description of Artificial Sequence: Synthetic oligonucleotide
uucucgacaccaggucugc

SEQ ID NO: 5913 - RNA, 19 nt, Artificial Sequence
  Description of Artificial Sequence: Synthetic oligonucleotide
ucucucgacaccaggucug

SEQ ID NO: 5914 - RNA, 19 nt, Artificial Sequence
  Description of Artificial Sequence: Synthetic oligonucleotide
uucucucgacaccaggucu

SEQ ID NO: 5915 - RNA, 19 nt, Artificial Sequence
  Description of Artificial Sequence: Synthetic oligonucleotide
uaucucucgacaccagguc

SEQ ID NO: 5916 - RNA, 19 nt, Artificial Sequence
  Description of Artificial Sequence: Synthetic oligonucleotide
uagugaucucucgacacca

SEQ ID NO: 5917 - RNA, 19 nt, Artificial Sequence
  Description of Artificial Sequence: Synthetic oligonucleotide
ucagugaucucucgacacc

SEQ ID NO: 5918 - RNA, 19 nt, Artificial Sequence
  Description of Artificial Sequence: Synthetic oligonucleotide
uauuucagugaucucucga

SEQ ID NO: 5919 - RNA, 19 nt, Artificial Sequence
  Description of Artificial Sequence: Synthetic oligonucleotide
ugauuucagugaucucucg

SEQ ID NO: 5920 - RNA, 19 nt, Artificial Sequence
  Description of Artificial Sequence: Synthetic oligonucleotide
ucgauuucagugaucucuc

SEQ ID NO: 5921 - RNA, 19 nt, Artificial Sequence
  Description of Artificial Sequence: Synthetic oligonucleotide
ugcccgauuucagugaucu

SEQ ID NO: 5922 - RNA, 19 nt, Artificial Sequence
  Description of Artificial Sequence: Synthetic oligonucleotide
ugcagcccgauuucaguga

SEQ ID NO: 5923 - RNA, 19 nt, Artificial Sequence
  Description of Artificial Sequence: Synthetic oligonucleotide
uugcagcccgauuucagug

SEQ ID NO: 5924 - RNA, 19 nt, Artificial Sequence
  Description of Artificial Sequence: Synthetic oligonucleotide
ucccuugcagcccgauuuc

SEQ ID NO: 5925 - RNA, 19 nt, Artificial Sequence
  Description of Artificial Sequence: Synthetic oligonucleotide
uccccuugcagcccgauuu

SEQ ID NO: 5926 - RNA, 19 nt, Artificial Sequence
  Description of Artificial Sequence: Synthetic oligonucleotide
ugacaaaguggcaaaccug

SEQ ID NO: 5927 - RNA, 19 nt, Artificial Sequence
  Description of Artificial Sequence: Synthetic oligonucleotide
uggugcaggugaagauaca

SEQ ID NO: 5928 - RNA, 19 nt, Artificial Sequence
  Description of Artificial Sequence: Synthetic oligonucleotide
ucggugcaggugaagauac

SEQ ID NO: 5929 - RNA, 19 nt, Artificial Sequence
  Description of Artificial Sequence: Synthetic oligonucleotide
uuuggccggugcaggugaa

SEQ ID NO: 5930 - RNA, 19 nt, Artificial Sequence
  Description of Artificial Sequence: Synthetic oligonucleotide
uguugcauccuuggugguu

SEQ ID NO: 5931 - RNA, 19 nt, Artificial Sequence
  Description of Artificial Sequence: Synthetic oligonucleotide
ugcguugcauccuuggugg

SEQ ID NO: 5932 - RNA, 19 nt, Artificial Sequence
  Description of Artificial Sequence: Synthetic oligonucleotide
uccagcguugcauccuugg

SEQ ID NO: 5933 - RNA, 19 nt, Artificial Sequence
  Description of Artificial Sequence: Synthetic oligonucleotide
ugucuccagcguugcaucc

SEQ ID NO: 5934 - RNA, 19 nt, Artificial Sequence
  Description of Artificial Sequence: Synthetic oligonucleotide
ucugucuccagcguugcau

SEQ ID NO: 5935 - RNA, 19 nt, Artificial Sequence
  Description of Artificial Sequence: Synthetic oligonucleotide
uacugucuccagcguugca

SEQ ID NO: 5936 - RNA, 19 nt, Artificial Sequence
  Description of Artificial Sequence: Synthetic oligonucleotide
uccaagugauggacaucug

SEQ ID NO: 5937 - RNA, 19 nt, Artificial Sequence
  Description of Artificial Sequence: Synthetic oligonucleotide
ucccgaaaaauacuccucc

SEQ ID NO: 5938 - RNA, 19 nt, Artificial Sequence
  Description of Artificial Sequence: Synthetic oligonucleotide
ugcccgaaaaauacuccuc

SEQ ID NO: 5939 - RNA, 19 nt, Artificial Sequence
  Description of Artificial Sequence: Synthetic oligonucleotide
uccagcuuugcauuccgga

SEQ ID NO: 5940 - RNA, 19 nt, Artificial Sequence
  Description of Artificial Sequence: Synthetic oligonucleotide
uggcauguccagcuuugca

SEQ ID NO: 5941 - RNA, 19 nt, Artificial Sequence
  Description of Artificial Sequence: Synthetic oligonucleotide
ugauggccacacuguuuuc

SEQ ID NO: 5942 - RNA, 19 nt, Artificial Sequence
  Description of Artificial Sequence: Synthetic oligonucleotide
ucagcuuguggcuugggug

SEQ ID NO: 5943 - RNA, 19 nt, Artificial Sequence
  Description of Artificial Sequence: Synthetic oligonucleotide
ugagaccaugaaaaggugc

SEQ ID NO: 5944 - RNA, 19 nt, Artificial Sequence
  Description of Artificial Sequence: Synthetic oligonucleotide
ucuagaguaaaauguguuc

SEQ ID NO: 5945 - RNA, 19 nt, Artificial Sequence
  Description of Artificial Sequence: Synthetic oligonucleotide
ugugaugccucuagaguaa

SEQ ID NO: 5946 - RNA, 19 nt, Artificial Sequence
  Description of Artificial Sequence: Synthetic oligonucleotide
uccaggugaugccucuaga

SEQ ID NO: 5947 - RNA, 19 nt, Artificial Sequence
  Description of Artificial Sequence: Synthetic oligonucleotide
uuauagaucugaaugaaga

SEQ ID NO: 5948 - RNA, 19 nt, Artificial Sequence
  Description of Artificial Sequence: Synthetic oligonucleotide
ucgcggaugcgguagagac

SEQ ID NO: 5949 - RNA, 19 nt, Artificial Sequence
  Description of Artificial Sequence: Synthetic oligonucleotide
uuuaggaaggcuccagcuu

SEQ ID NO: 5950 - RNA, 19 nt, Artificial Sequence
  Description of Artificial Sequence: Synthetic oligonucleotide
uguuaggaaggcuccagcu

SEQ ID NO: 5951 - RNA, 19 nt, Artificial Sequence
  Description of Artificial Sequence: Synthetic oligonucleotide
uggugcauuaggcacccaa

SEQ ID NO: 5952 - RNA, 19 nt, Artificial Sequence
  Description of Artificial Sequence: Synthetic oligonucleotide
uugcagggugcauuaggca

SEQ ID NO: 5953 - RNA, 19 nt, Artificial Sequence
  Description of Artificial Sequence: Synthetic oligonucleotide
ucgaggccccaguggacac

SEQ ID NO: 5954 - RNA, 19 nt, Artificial Sequence
  Description of Artificial Sequence: Synthetic oligonucleotide
uuugaagauaggauguauc

SEQ ID NO: 5955 - RNA, 19 nt, Artificial Sequence
  Description of Artificial Sequence: Synthetic oligonucleotide
uguaucgcagguggggaau

SEQ ID NO: 5956 - RNA, 19 nt, Artificial Sequence
  Description of Artificial Sequence: Synthetic oligonucleotide
uuguaucgcagguggggaa

SEQ ID NO: 5957 - RNA, 19 nt, Artificial Sequence
  Description of Artificial Sequence: Synthetic oligonucleotide
ucucauuaucuggucgaaa

SEQ ID NO: 5958 - RNA, 19 nt, Artificial Sequence
  Description of Artificial Sequence: Synthetic oligonucleotide
uugcucauuaucuggucga

SEQ ID NO: 5959 - RNA, 19 nt, Artificial Sequence
  Description of Artificial Sequence: Synthetic oligonucleotide
uuccagcuugcuugagcag

SEQ ID NO: 5960 - RNA, 19 nt, Artificial Sequence
  Description of Artificial Sequence: Synthetic oligonucleotide
uuugcagcccgauuucagu

SEQ ID NO: 5961 - RNA, 19 nt, Artificial Sequence
  Description of Artificial Sequence: Synthetic oligonucleotide
uccuugcagcccgauuuca

SEQ ID NO: 5962 - RNA, 19 nt, Artificial Sequence
  Description of Artificial Sequence: Synthetic oligonucleotide
ugccccuugcagcccgauu

SEQ ID NO: 5963 - RNA, 19 nt, Artificial Sequence
  Description of Artificial Sequence: Synthetic oligonucleotide
uguugggcagugucgccau

SEQ ID NO: 5964 - RNA, 19 nt, Artificial Sequence
  Description of Artificial Sequence: Synthetic oligonucleotide
uaguugggcagugucgcca

SEQ ID NO: 5965 - RNA, 19 nt, Artificial Sequence
  Description of Artificial Sequence: Synthetic oligonucleotide
ucagcuuugcauuccggau

SEQ ID NO: 5966 - RNA, 19 nt, Artificial Sequence
  Description of Artificial Sequence: Synthetic oligonucleotide
uaagagggugggacuuggg

SEQ ID NO: 5967 - RNA, 19 nt, Artificial Sequence
  Description of Artificial Sequence: Synthetic oligonucleotide
uagugaucucucgacacca

SEQ ID NO: 5968 - RNA, 19 nt, Artificial Sequence
  Description of Artificial Sequence: Synthetic oligonucleotide
uauuucagugaucucucga

SEQ ID NO: 5969 - RNA, 19 nt, Artificial Sequence
  Description of Artificial Sequence: Synthetic oligonucleotide
ugacaaaguggcaaaccug

SEQ ID NO: 5970 - RNA, 19 nt, Artificial Sequence
  Description of Artificial Sequence: Synthetic oligonucleotide
ugagaccaugaaaaggugc

SEQ ID NO: 5971 - RNA, 19 nt, Artificial Sequence
  Description of Artificial Sequence: Synthetic oligonucleotide
uguuaggaaggcuccagcu

SEQ ID NO: 5972 - DNA, 21 bp, Artificial Sequence
  Description of Artificial Sequence: Synthetic oligonucleotide
  Description of Combined DNA/RNA Molecule: Synthetic oligonucleotide
ggaaaucaucuaucgguautt

SEQ ID NO: 5973 - DNA, 21 bp, Artificial Sequence
  Description of Artificial Sequence: Synthetic oligonucleotide
  Description of Combined DNA/RNA Molecule: Synthetic oligonucleotide
auaccgauagaugauuucctt

SEQ ID NO: 5974 - DNA, 21 bp, Artificial Sequence
  Description of Artificial Sequence: Synthetic oligonucleotide
  Description of Combined DNA/RNA Molecule: Synthetic oligonucleotide
gcacacuguucgaagcugatt

SEQ ID NO: 5975 - DNA, 21 bp, Artificial Sequence
  Description of Artificial Sequence: Synthetic oligonucleotide
  Description of Combined DNA/RNA Molecule: Synthetic oligonucleotide
ucagcuucgaacagugugctt

SEQ ID NO: 5976-5999 - skipped (24 entries)

SEQ ID NO: 6000 - DNA, 151 bp, Artificial Sequence
  Description of Artificial Sequence: Synthetic polynucleotide
cagagctgcagacctggtgtcgagagatcactgaaatcgggctgcaaggggcccaggaccgagggtttcctgtctctttacaggctcgggaccaggtttgccactttgtcaccatgtgtatcttcacctgcaccggccaacacgcctctgt

SEQ ID NO: 6001 - DNA, 51 bp, Artificial Sequence
  Description of Artificial Sequence: Synthetic oligonucleotide
cagagctgcagacctggtgtcgagagatcactgaaatcgggctgcaagggg

SEQ ID NO: 6002 - DNA, 51 bp, Artificial Sequence
  Description of Artificial Sequence: Synthetic oligonucleotide
ctttacaggctcgggaccaggtttgccactttgtcaccatgtgtatcttca

SEQ ID NO: 6003 - DNA, 101 bp, Artificial Sequence
  Description of Artificial Sequence: Synthetic polynucleotide
accctcttcccatgtcccaccctccctagaggggcaccttttcatggtctctgcacccagtgaacacattttactctagaggcatcacctgggaccttact

SEQ ID NO: 6004 - DNA, 50 bp, Artificial Sequence
  Description of Artificial Sequence: Synthetic oligonucleotide
tagaggggcaccttttcatggtctctgcacccagtgaacacattttactc

SEQ ID NO: 6005 - DNA, 151 bp, Artificial Sequence
  Description of Artificial Sequence: Synthetic polynucleotide
gacatgggaattttcgaccagataatgagcactggtgggggaggccacgtgcagctgctcaagcaagctggagccttcctaacctacagctccttctgtccccctgatgacttggccgaccgggggctcctgggagtgaagtcttccttct

SEQ ID NO: 6006 - DNA, 51 bp, Artificial Sequence
  Description of Artificial Sequence: Synthetic oligonucleotide
gcagctgctcaagcaagctggagccttcctaacctacagctccttctgtcc

SEQ ID NO: 6007 - RNA, 13 nt, Artificial Sequence
  Description of Artificial Sequence: Synthetic oligonucleotide
cagguuugccacu

SEQ ID NO: 6008 - RNA, 11 nt, Artificial Sequence
  Description of Artificial Sequence: Synthetic oligonucleotide
gcaccuuuuca

SEQ ID NO: 6009 - RNA, 10 nt, Artificial Sequence
  Description of Artificial Sequence: Synthetic oligonucleotide
ugucgagaga

SEQ ID NO: 6010 - RNA, 11 nt, Artificial Sequence
  Description of Artificial Sequence: Synthetic oligonucleotide
gagagaucacu

SEQ ID NO: 6011 - RNA, 18 nt, Artificial Sequence
  Description of Artificial Sequence: Synthetic oligonucleotide
uggugucgagagaucacu

SEQ ID NO: 6012 - RNA, 18 nt, Artificial Sequence
  Description of Artificial Sequence: Synthetic oligonucleotide
ucgagagaucacugaaau

SEQ ID NO: 6013 - RNA, 18 nt, Artificial Sequence
  Description of Artificial Sequence: Synthetic oligonucleotide
cagguuugccacuuuguc

SEQ ID NO: 6014 - RNA, 18 nt, Artificial Sequence
  Description of Artificial Sequence: Synthetic oligonucleotide
gcaccuuuucauggucuc

SEQ ID NO: 6015 - RNA, 18 nt, Artificial Sequence
  Description of Artificial Sequence: Synthetic oligonucleotide
agcuggagccuuccuaac

SEQ ID NO: 6016 - RNA, 11 nt, Artificial Sequence
  Description of Artificial Sequence: Synthetic oligonucleotide
agugaucucuc

SEQ ID NO: 6017 - RNA, 13 nt, Artificial Sequence
  Description of Artificial Sequence: Synthetic oligonucleotide
aguggcaaaccug

SEQ ID NO: 6018 - RNA, 11 nt, Artificial Sequence
  Description of Artificial Sequence: Synthetic oligonucleotide
ugaaaaggugc

SEQ ID NO: 6019 - RNA, 18 nt, Artificial Sequence
  Description of Artificial Sequence: Synthetic oligonucleotide
agugaucucucgacacca

SEQ ID NO: 6020 - RNA, 18 nt, Artificial Sequence
  Description of Artificial Sequence: Synthetic oligonucleotide
auuucagugaucucucga

SEQ ID NO: 6021 - RNA, 18 nt, Artificial Sequence
  Description of Artificial Sequence: Synthetic oligonucleotide
gacaaaguggcaaaccug

SEQ ID NO: 6022 - RNA, 18 nt, Artificial Sequence
  Description of Artificial Sequence: Synthetic oligonucleotide
gagaccaugaaaaggugc

SEQ ID NO: 6023 - RNA, 18 nt, Artificial Sequence
  Description of Artificial Sequence: Synthetic oligonucleotide
guuaggaaggcuccagcu

SEQ ID NO: 6024 - RNA, 13 nt, Artificial Sequence
  Description of Artificial Sequence: Synthetic oligonucleotide
ugucgagagauca

SEQ ID NO: 6025 - RNA, 10 nt, Artificial Sequence
  Description of Artificial Sequence: Synthetic oligonucleotide
ucucucgaca

SEQ ID NO: 6026 - RNA, 11 nt, Artificial Sequence
  Description of Artificial Sequence: Synthetic oligonucleotide
uggugucgaga

SEQ ID NO: 6027 - RNA, 12 nt, Artificial Sequence
  Description of Artificial Sequence: Synthetic oligonucleotide
gcaccuuuucau

SEQ ID NO: 6028 - RNA, 12 nt, Artificial Sequence
  Description of Artificial Sequence: Synthetic oligonucleotide
gucgagagauca

SEQ ID NO: 6029 - RNA, 12 nt, Artificial Sequence
  Description of Artificial Sequence: Synthetic oligonucleotide
ugaucucucgac

SEQ ID NO: 6030 - RNA, 11 nt, Artificial Sequence
  Description of Artificial Sequence: Synthetic oligonucleotide
ucucgacacca

SEQ ID NO: 6031 - RNA, 12 nt, Artificial Sequence
  Description of Artificial Sequence: Synthetic oligonucleotide
augaaaaggugc

SEQ ID NO: 6032 - RNA, 12 nt, Artificial Sequence
  Description of Artificial Sequence: Synthetic oligonucleotide
uuugccacuuug

SEQ ID NO: 6033 - RNA, 12 nt, Artificial Sequence
  Description of Artificial Sequence: Synthetic oligonucleotide
caaaguggcaaa

SEQ ID NO: 6034 - RNA, 14 nt, Artificial Sequence
  Description of Artificial Sequence: Synthetic oligonucleotide
agcuggagccuucc

SEQ ID NO: 6035 - RNA, 10 nt, Artificial Sequence
  Description of Artificial Sequence: Synthetic oligonucleotide
uuugccacuu

SEQ ID NO: 6036 - RNA, 10 nt, Artificial Sequence
  Description of Artificial Sequence: Synthetic oligonucleotide
aaguggcaaa

SEQ ID NO: 6037 - RNA, 10 nt, Artificial Sequence
  Description of Artificial Sequence: Synthetic oligonucleotide
uggugucgag

SEQ ID NO: 6038 - RNA, 10 nt, Artificial Sequence
  Description of Artificial Sequence: Synthetic oligonucleotide
cucgacacca

SEQ ID NO: 6039-6049 - skipped (11 entries)

SEQ ID NO: 6050 - RNA, 21 nt, Artificial Sequence
  Description of Artificial Sequence: Synthetic oligonucleotide
uggugucgagagaucacuauu

SEQ ID NO: 6051 - RNA, 21 nt, Artificial Sequence
  Description of Artificial Sequence: Synthetic oligonucleotide
ucgagagaucacugaaauauu

SEQ ID NO: 6052 - RNA, 21 nt, Artificial Sequence
  Description of Artificial Sequence: Synthetic oligonucleotide
cagguuugccacuuugucauu

SEQ ID NO: 6053 - RNA, 21 nt, Artificial Sequence
  Description of Artificial Sequence: Synthetic oligonucleotide
gcaccuuuucauggucucauu

SEQ ID NO: 6054 - RNA, 21 nt, Artificial Sequence
  Description of Artificial Sequence: Synthetic oligonucleotide
agcuggagccuuccuaacauu

SEQ ID NO: 6055 - RNA, 24 nt, Artificial Sequence
  Description of Artificial Sequence: Synthetic oligonucleotide
  modified_base (22)..(24): a, u, c, or g
uggugucgagagaucacuauunnn

SEQ ID NO: 6056 - RNA, 24 nt, Artificial Sequence
  Description of Artificial Sequence: Synthetic oligonucleotide
  modified_base (22)..(24): a, u, c, or g
ucgagagaucacugaaauauunnn

SEQ ID NO: 6057 - RNA, 24 nt, Artificial Sequence
  Description of Artificial Sequence: Synthetic oligonucleotide
  modified_base (22)..(24): a, u, c, or g
cagguuugccacuuugucauunnn

SEQ ID NO: 6058 - RNA, 24 nt, Artificial Sequence
  Description of Artificial Sequence: Synthetic oligonucleotide
  modified_base (22)..(24): a, u, c, or g
gcaccuuuucauggucucauunnn

SEQ ID NO: 6059 - RNA, 24 nt, Artificial Sequence
  Description of Artificial Sequence: Synthetic oligonucleotide
  modified_base (22)..(24): a, u, c, or g
agcuggagccuuccuaacauunnn

SEQ ID NO: 6060 - RNA, 24 nt, Artificial Sequence
  Description of Artificial Sequence: Synthetic oligonucleotide
  modified_base (22)..(24): a, u, c, or g
uggugucgagagaucacuauunnn

SEQ ID NO: 6061 - RNA, 24 nt, Artificial Sequence
  Description of Artificial Sequence: Synthetic oligonucleotide
  modified_base (22)..(24): a, u, c, or g
ucgagagaucacugaaauauunnn

SEQ ID NO: 6062 - RNA, 24 nt, Artificial Sequence
  Description of Artificial Sequence: Synthetic oligonucleotide
  modified_base (22)..(24): a, u, c, or g
cagguuugccacuuugucauunnn

SEQ ID NO: 6063 - RNA, 24 nt, Artificial Sequence
  Description of Artificial Sequence: Synthetic oligonucleotide
  modified_base (22)..(24): a, u, c, or g
gcaccuuuucauggucucauunnn

SEQ ID NO: 6064 - RNA, 24 nt, Artificial Sequence
  Description of Artificial Sequence: Synthetic oligonucleotide
  modified_base (22)..(24): a, u, c, or g
agcuggagccuuccuaacauunnn

SEQ ID NO: 6065 - RNA, 21 nt, Artificial Sequence
  Description of Artificial Sequence: Synthetic oligonucleotide
uagugaucucucgacaccauu

SEQ ID NO: 6066 - RNA, 21 nt, Artificial Sequence
  Description of Artificial Sequence: Synthetic oligonucleotide
uauuucagugaucucucgauu

SEQ ID NO: 6067 - RNA, 21 nt, Artificial Sequence
  Description of Artificial Sequence: Synthetic oligonucleotide
ugacaaaguggcaaaccuguu

SEQ ID NO: 6068 - RNA, 21 nt, Artificial Sequence
  Description of Artificial Sequence: Synthetic oligonucleotide
ugagaccaugaaaaggugcuu

SEQ ID NO: 6069 - RNA, 21 nt, Artificial Sequence
  Description of Artificial Sequence: Synthetic oligonucleotide
uguuaggaaggcuccagcuuu

SEQ ID NO: 6070 - RNA, 21 nt, Artificial Sequence
  Description of Artificial Sequence: Synthetic oligonucleotide
uagugaucucucgacaccauu

SEQ ID NO: 6071 - RNA, 21 nt, Artificial Sequence
  Description of Artificial Sequence: Synthetic oligonucleotide
uauuucagugaucucucgauu

SEQ ID NO: 6072 - RNA, 21 nt, Artificial Sequence
  Description of Artificial Sequence: Synthetic oligonucleotide
ugacaaaguggcaaaccuguu

SEQ ID NO: 6073 - RNA, 21 nt, Artificial Sequence
  Description of Artificial Sequence: Synthetic oligonucleotide
ugagaccaugaaaaggugcuu

SEQ ID NO: 6074 - RNA, 21 nt, Artificial Sequence
  Description of Artificial Sequence: Synthetic oligonucleotide
uguuaggaaggcuccagcuuu

We claim:

1. A pharmaceutical composition comprising an siRNA molecule comprising a sense strand and an antisense strand, which targets SEQ ID NO: 5357 and when administered to a patient in an effective amount reduces eosinophil count, wherein (i) the siRNA comprises a modification comprising a modified nucleoside and/or a modified internucleoside linkage, and/or (ii) the pharmaceutical composition comprises a pharmaceutically acceptable carrier; and wherein the patient comprises nasal polyposis, chronic sinusitis, allergic rhinitis, or NSAID-exacerbated respiratory disease, or a combination thereof.

2. The pharmaceutical composition of claim 1, wherein the systemic or local eosinophil count is reduced by about 10% or more as compared to the eosinophil count prior to administration.

3. A pharmaceutical composition comprising an siRNA molecule which targets SEQ ID NO: 5357 and when administered in an effective amount to a patient comprising nasal polyps, the nasal polyps are reduced in number and/or size the patient, wherein (i) the siRNA comprises a modification comprising a modified nucleoside and/or a modified internucleoside linkage, and/or (ii) the pharmaceutical composition comprises a pharmaceutically acceptable carrier.

4. The pharmaceutical composition of claim 3, wherein the nasal polyps are reduced in number and/or size by about 10% or more by CT scan or endoscopic assessment, as compared to the number and/or size prior to administration.

5. A pharmaceutical composition comprising an siRNA molecule which targets SEQ ID NO: 5357 and when administered to a patient in an effective amount increases nasal inspiratory peak flow in the patient, wherein (i) the siRNA comprises a modification comprising a modified nucleoside and/or a modified internucleoside linkage, and/or (ii) the pharmaceutical composition comprises a pharmaceutically acceptable carrier.

6. The pharmaceutical composition of claim 5, wherein the nasal inspiratory peak flow is increased by about 10% or more, as compared to prior to administration.

7. A pharmaceutical composition comprising an siRNA molecule which targets SEQ ID NO: 5357 and when administered to a patient in an effective amount reduces airway symptoms in the patient, wherein the patient comprises nasal polyposis, chronic sinusitis, allergic rhinitis, or NSAID-exacerbated respiratory disease, or a combination thereof, and wherein (i) the siRNA comprises a modification comprising a modified nucleoside and/or a modified internucleoside linkage, and/or (ii) the pharmaceutical composition comprises a pharmaceutically acceptable carrier.

8. The pharmaceutical composition of claim 7, wherein the airway inflammation symptoms are reduced by about 10% or more on a patient-reported outcome measure, as compared to prior to administration.

9. A pharmaceutical composition comprising an siRNA molecule which targets SEQ ID NO: 5357 and when administered to a patient in an effective amount improves sense of smell in the patient, wherein the patient comprises nasal polyposis, chronic sinusitis, allergic rhinitis, or NSAID-exacerbated respiratory disease, or a combination thereof, and wherein (i) the siRNA comprises a modification comprising a modified nucleoside and/or a modified internucleoside linkage, and/or (ii) the pharmaceutical composition comprises a pharmaceutically acceptable carrier.

10. The pharmaceutical composition of claim 9, wherein the sense of smell is improved by about 10% or more on a patient-reported outcome measure, as compared to prior to administration.

11. A pharmaceutical composition comprising an siRNA molecule that inhibits the expression of ALOX15, wherein the siRNA comprises a sense strand and an antisense strand, each strand is independently about 14-30 nucleosides in length, and at least one of the sense strand and the antisense strand comprises a nucleoside sequence comprising about 14-30 contiguous nucleosides of SEQ ID NO: 6000 (C AGAGCTGCAG ACCTGGTGTC GAGAGATCAC TGAAATCGGG CTGCAAGGGG CCCAGGACCG AGGGTTTCCT GTCTCTTTAC AGGCTCGGGA CCAGGTTTGC CACTTTGTCA CCATGTGTAT CTTCACCTGC ACCGGCCAAC ACGCCTCTGT); wherein (i) the siRNA comprises a modification comprising a modified nucleoside and/or a modified internucleoside linkage, and/or (ii) the pharmaceutical composition comprises a pharmaceutically acceptable carrier.

12. The pharmaceutical composition of claim 11, wherein the sense strand comprises about 14-30 contiguous nucleosides of SEQ ID NO: 6001 (C AGAGCTGCAG ACCTGGTGTC GAGAGATCAC TGAAATCGGG CTGCAAGGGG) or SEQ ID NO: 6002 (CTTTAC AGGCTCGGGA CCAGGTTTGC CACTTTGTCA CCATGTGTAT CTTCA).

13. A pharmaceutical composition comprising an siRNA molecule that inhibits the expression of ALOX15, wherein the siRNA comprises a sense strand and an antisense strand, each strand is independently about 14-30 nucleosides in length, and at least one of the sense strand and the antisense strand comprises a nucleoside sequence comprising about 14-30 contiguous nucleosides of SEQ ID NO: 6003 (A CCCTCTTCCC ATGTCCCACC CTCCCTAGAG GGGCACCTTT TCATGGTCTC TGCACCCAGT GAACACATTT TACTCTAGAG GCATCACCTG GGACCTTACT); wherein (i) the siRNA comprises a modification comprising a modified nucleoside and/or a modified internucleoside linkage, and/or (ii) the pharmaceutical composition comprises a pharmaceutically acceptable carrier.

14. The pharmaceutical composition of claim 13, wherein the sense strand comprises about 14-30 contiguous nucleosides of SEQ ID NO: 6004 (TAGAG GGGCACCTTT TCATGGTCTC TGCACCCAGT GAACACATTT TACTC).

15. A pharmaceutical composition comprising an siRNA molecule that inhibits the expression of ALOX15, wherein the siRNA comprises a sense strand and an antisense strand, each strand is independently about 14-30 nucleosides in length, and at least one of the sense strand and the antisense strand comprises a nucleoside sequence comprising about 14-30 contiguous nucleosides of SEQ ID NO: 6005 (G ACATGGGAAT TTTCGACCAG ATAATGAGCA CTGGTGGGGG AGGCCACGTG CAGCTGCTCA AGCAAGCTGG AGCCTTCCTA ACCTACAGCT CCTTCTGTCC CCCTGATGAC TTGGCCGACC GGGGGCTCCT GGGAGTGAAG TCTTCCTTCT); wherein (i) the siRNA comprises a modification comprising a modified nucleoside and/or a modified internucleoside linkage, and/or (ii) the pharmaceutical composition comprises a pharmaceutically acceptable carrier.

16. The pharmaceutical composition of claim 15, wherein the sense strand comprises about 14-30 contiguous nucleosides of SEQ ID NO: 6006 (G CAGCTGCTCA AGCAAGCTGG AGCCTTCCTA ACCTACAGCT CCTTCTGTCC).

17. The pharmaceutical composition of any one of claims 1-16, comprising the modified internucleoside linkage.

18. The pharmaceutical composition of claim 17, wherein the modified internucleoside linkage comprises alkylphosphonate, phosphorothioate, methylphosphonate, phosphorodithioate, alkylphosphonothioate, phosphoramidate, carbamate, carbonate, phosphate triester, acetamidate, or carboxymethyl ester, or a combination thereof.

19. The pharmaceutical composition of claim 18, wherein the modified internucleoside linkage comprises one or more phosphorothioate linkages.

20. The pharmaceutical composition of any one of claims 1-19, comprising the modified nucleoside.

21. The pharmaceutical composition of claim 20, wherein the modified nucleoside comprises a locked nucleic acid (LNA), hexitol nucleic acid (HLA), cyclohexene nucleic acid (CeNA), 2′-methoxyethyl, 2′-O-alkyl, 2′-O-allyl, 2′-O-allyl, 2′-fluoro, or 2′-deoxy, or a combination thereof.

22. The pharmaceutical composition of claim 20 or claim 21, wherein the modified nucleoside comprises a 2′-O-methyl nucleoside, 2′-deoxyfluoro nucleoside, 2′-O—N-methylacetamido (2′-O-NMA) nucleoside, a 2′-O-dimethylaminoethoxyethyl (2′-O-DMAEOE) nucleoside, 2′-O-aminopropyl (2′-O-AP) nucleoside, or 2′-ara-F, or a combination thereof.

23. The pharmaceutical composition of any one of claims 20-22, wherein the modified nucleoside comprises one or more 2′fluoro modified nucleosides.

24. The pharmaceutical composition of any one of claims 20-23, wherein the modified nucleoside comprises a 2′ O-alkyl modified nucleoside.

25. The pharmaceutical composition of any one of claims 1-24, wherein the siRNA comprises a ribose.

26. The pharmaceutical composition of any one of claims 1-25, further comprising a lipid attached at either 3′ or 5′ terminus of the sense strand and/or antisense strand of the siRNA.

27. The pharmaceutical composition of claim 26, wherein the lipid comprises cholesterol, myristoyl, palmitoyl, stearoyl, lithocholoyl, docosanoyl, docosahexaenoyl, myristyl, palmityl stearyl, or a-tocopherol, or a combination thereof.

28. The pharmaceutical composition of any one of claims 1-27, wherein the sense strand and the antisense strand form a double-stranded RNA duplex.

29. The pharmaceutical composition of claim 28, wherein the double-stranded RNA duplex comprises from about 14 to about 30 nucleosides.

30. The pharmaceutical composition of claim 28 or claim 29, wherein the first base pair of the double-stranded RNA duplex is an AU base pair.

31. The pharmaceutical composition of any one of claims 1-30, wherein the sense strand comprises pattern 1S: 5′ fN s mN s fN-mN-fN-mN-fN-fN-fN-mN-fN-mN-fN-mN-fN-mN-fN-mN-fN s mN s mN 3′, wherein “fN” is a 2′ fluoro-modified nucleoside, “mN” is a 2′ O-methyl modified nucleoside, “-” is a phosphodiester, and “s” is a phosphorothioate.

32. The pharmaceutical composition of any one of claims 1-30, wherein the sense strand comprises pattern 2S: 5′ mN s mN s mN-mN-fN-mN-fN-fN-fN-mN-mN-mN-mN-mN-mN-mN-mN-mN-mN s mN s mN 3′, wherein “fN” is a 2′ fluoro-modified nucleoside, “mN” is a 2′ O-methyl modified nucleoside, “-” is a phosphodiester, and “s” is a phosphorothioate.

33. The pharmaceutical composition of any one of claims 1-30, wherein the sense strand comprises pattern 3S: 5′ mN s mN s mN-mN-fN-mN-fN-mN-fN-mN-mN-mN-mN-mN-mN-mN-mN-mN-mN s mN s mN 3′, wherein “fN” is a 2′ fluoro-modified nucleoside, “mN” is a 2′ O-methyl modified nucleoside, “-” is a phosphodiester, and “s” is a phosphorothioate.

34. The pharmaceutical composition of any one of claims 1-30, wherein the sense strand comprises pattern 4S: 5′ fN s mN s fN-mN-fN-mN-fN-fN-fN-mN-fN-mN-fN-mN-fN-mN-fN-mN-fN s mN s mN-N-Lipid 3′, wherein “fN” is a 2′ fluoro-modified nucleoside, “mN” is a 2′ O-methyl modified nucleoside, “-” is a phosphodiester, “s” is a phosphorothioate, and N comprises one or more nucleosides.

35. The pharmaceutical composition of any one of claims 1-30, wherein the sense strand comprises pattern 5S: 5′ mN s mN s mN-mN-fN-mN-fN-fN-fN-mN-mN-mN-mN-mN-mN-mN-mN-mN-mN s mN s mN-N-Lipid 3′, wherein “fN” is a 2′ fluoro-modified nucleoside, “mN” is a 2′ O-methyl modified nucleoside, “-” is a phosphodiester, “s” is a phosphorothioate, and N comprises one or more nucleosides.

36. The pharmaceutical composition of any one of claims 1-35, wherein the antisense strand comprises pattern 1AS: 5′ mN s fN s mN-fN-mN-fN-mN-fN-mN-fN-mN-mN-mN-fN-mN-fN-mN-fN-mN s mN s mN 3′, wherein “fN” is a 2′ fluoro-modified nucleoside, “mN” is a 2′ O-methyl modified nucleoside, “-” is a phosphodiester, and “s” is a phosphorothioate.

37. The pharmaceutical composition of any one of claims 1-35, wherein the antisense strand comprises pattern 2AS: 5′ mN s fN s mN-mN-mN-fN-mN-fN-fN-mN-mN-mN-mN-fN-mN-fN-mN-mN-mN s mN s mN 3′, wherein “fN” is a 2′ fluoro-modified nucleoside, “mN” is a 2′ O-methyl modified nucleoside, “-” is a phosphodiester, and “s” is a phosphorothioate.

38. The pharmaceutical composition of any one of claims 1-35, wherein the antisense strand comprises pattern 3AS: 5′ mN s fN s mN-mN-mN-fN-mN-mN-mN-mN-mN-mN-mN-fN-mN-fN-mN-mN-mN s mN s mN 3′, wherein “fN” is a 2′ fluoro-modified nucleoside, “mN” is a 2′ O-methyl modified nucleoside, “-” is a phosphodiester, and “s” is a phosphorothioate.

39. The pharmaceutical composition of any one of claims 1-35, wherein the antisense strand comprises pattern 4AS: 5′ mN s fN s mN-fN-mN-fN-mN-mN-mN-mN-mN-mN-mN-fN-mN-fN-mN-mN-mN s mN s mN 3′, wherein “fN” is a 2′ fluoro-modified nucleoside, “mN” is a 2′ O-methyl modified nucleoside, “-” is a phosphodiester, and “s” is a phosphorothioate.

40. The pharmaceutical composition of any one of claims 1-30, wherein the sense strand comprises pattern 1S and the antisense strand comprises pattern 1AS, 2AS, 3AS, or 4AS.

41. The pharmaceutical composition of any one of claims 1-30, wherein the sense strand comprises pattern 2S and the antisense strand comprises pattern 1AS, 2AS, 3AS, or 4AS.

42. The pharmaceutical composition of any one of claims 1-30, wherein the sense strand comprises pattern 3S and the antisense strand comprises pattern 1AS, 2AS, 3AS, or 4AS.

43. The pharmaceutical composition of any one of claims 1-30, wherein the sense strand comprises pattern 4S and the antisense strand comprises pattern 1AS, 2AS, 3AS, or 4AS.

44. The pharmaceutical composition of any one of claims 1-29, wherein
(i) the sense strand comprises SEQ ID NO: 3027 or a nucleic acid sequence thereof having about 1 or 2 nucleoside substitutions, additions, or deletions, and the antisense strand comprises SEQ ID NO: 3028 or a nucleic acid sequence thereof having about 1 or 2 nucleoside substitutions, additions, or deletions;
(ii) the sense strand comprises SEQ ID NO: 5664 or a nucleic acid sequence thereof having about 1 or 2 nucleoside substitutions, additions, or deletions, and the antisense strand comprises SEQ ID NO: 5765 or a nucleic acid sequence thereof having about 1 or 2 nucleoside substitutions, additions, or deletions;
(iii) the sense strand comprises SEQ ID NO: 5866 or a nucleic acid sequence thereof having about 1 or 2 nucleoside substitutions, additions, or deletions, and the antisense strand comprises SEQ ID NO: 5967 or a nucleic acid sequence thereof having about 1 or 2 nucleoside substitutions, additions, or deletions;
(iv) the sense strand comprises SEQ ID NO: 5558 or a nucleic acid sequence thereof having about 1 or 2 nucleoside substitutions, additions, or deletions, and the antisense strand comprises SEQ ID NO: 5559 or a nucleic acid sequence thereof having about 1 or 2 nucleoside substitutions, additions, or deletions; or
(v) the sense strand comprises SEQ ID NO: 5456 or a nucleic acid sequence thereof having about 1 or 2 nucleoside substitutions, additions, or deletions, and the antisense strand comprises SEQ ID NO: 5457 or a nucleic acid sequence thereof having about 1 or 2 nucleoside substitutions, additions, or deletions.

45. The pharmaceutical composition of any one of claims 1-29, wherein
(i) the sense strand comprises SEQ ID NO: 3037 or a nucleic acid sequence thereof having about 1 or 2 nucleoside substitutions, additions, or deletions, and the antisense strand comprises SEQ ID NO: 3038 or a nucleic acid sequence thereof having about 1 or 2 nucleoside substitutions, additions, or deletions;
(ii) the sense strand comprises SEQ ID NO: 5665 or a nucleic acid sequence thereof having about 1 or 2 nucleoside substitutions, additions, or deletions, and the antisense strand comprises SEQ ID NO: 5766 or a nucleic acid sequence thereof having about 1 or 2 nucleoside substitutions, additions, or deletions;
(iii) the sense strand comprises SEQ ID NO: 5867 or a nucleic acid sequence thereof having about 1 or 2 nucleoside substitutions, additions, or deletions, and the antisense strand comprises SEQ ID NO: 5968 or a nucleic acid sequence thereof having about 1 or 2 nucleoside substitutions, additions, or deletions;
(iv) the sense strand comprises SEQ ID NO: 5560 or a nucleic acid sequence thereof having about 1 or 2 nucleoside substitutions, additions, or deletions, and the antisense strand comprises SEQ ID NO: 5561 or a nucleic acid sequence thereof having about 1 or 2 nucleoside substitutions, additions, or deletions; or
(v) the sense strand comprises SEQ ID NO: 5460 or a nucleic acid sequence thereof having about 1 or 2 nucleoside substitutions, additions, or deletions, and the antisense strand comprises SEQ ID NO: 5461 or a nucleic acid sequence thereof having about 1 or 2 nucleoside substitutions, additions, or deletions.

46. The pharmaceutical composition of any one of claims 1-29, wherein
(i) the sense strand comprises SEQ ID NO: 3183 or a nucleic acid sequence thereof having about 1 or 2 nucleoside substitutions, additions, or deletions, and the antisense strand comprises SEQ ID NO: 3184 or a nucleic acid sequence thereof having about 1 or 2 nucleoside substitutions, additions, or deletions;
(ii) the sense strand comprises SEQ ID NO: 5666 or a nucleic acid sequence thereof having about 1 or 2 nucleoside substitutions, additions, or deletions, and the antisense strand comprises SEQ ID NO: 5767 or a nucleic acid sequence thereof having about 1 or 2 nucleoside substitutions, additions, or deletions;
(iii) the sense strand comprises SEQ ID NO: 5868 or a nucleic acid sequence thereof having about 1 or 2 nucleoside substitutions, additions, or deletions, and the antisense strand comprises SEQ ID NO: 5969 or a nucleic acid sequence thereof having about 1 or 2 nucleoside substitutions, additions, or deletions;
(iv) or the sense strand comprises SEQ ID NO: 5562 or a nucleic acid sequence thereof having about 1 or 2 nucleoside substitutions, additions, or deletions, and the antisense strand comprises SEQ ID NO: 5563 or a nucleic acid sequence thereof having about 1 or 2 nucleoside substitutions, additions, or deletions; or
(v) the sense strand comprises SEQ ID NO: 5476 or a nucleic acid sequence thereof having about 1 or 2 nucleoside substitutions, additions, or deletions, and the antisense strand comprises SEQ ID NO: 5477 or a nucleic acid sequence thereof having about 1 or 2 nucleoside substitutions, additions, or deletions.

47. The pharmaceutical composition of any one of claims 1-29, wherein
(i) the sense strand comprises SEQ ID NO: 4265 or a nucleic acid sequence thereof having about 1 or 2 nucleoside substitutions, additions, or deletions, and the antisense strand comprises SEQ ID NO: 4266 or a nucleic acid sequence thereof having about 1 or 2 nucleoside substitutions, additions, or deletions;
(ii) the sense strand comprises SEQ ID NO: 5667 or a nucleic acid sequence thereof having about 1 or 2 nucleoside substitutions, additions, or deletions, and the antisense strand comprises SEQ ID NO: 5768 or a nucleic acid sequence thereof having about 1 or 2 nucleoside substitutions, additions, or deletions;
(iii) the sense strand comprises SEQ ID NO: 5869 or a nucleic acid sequence thereof having about 1 or 2 nucleoside substitutions, additions, or deletions, and the antisense strand comprises SEQ ID NO: 5970 or a nucleic acid sequence thereof having about 1 or 2 nucleoside substitutions, additions, or deletions;
(iv) the sense strand comprises SEQ ID NO: 5564 or a nucleic acid sequence thereof having about 1 or 2 nucleoside substitutions, additions, or deletions, and the antisense strand comprises SEQ ID NO: 5565 or a nucleic acid sequence thereof having about 1 or 2 nucleoside substitutions, additions, or deletions; or
(v) the sense strand comprises SEQ ID NO: 5510 or a nucleic acid sequence thereof having about 1 or 2 nucleoside substitutions, additions, or deletions, and the antisense strand comprises SEQ ID NO: 5511 or a nucleic acid sequence thereof having about 1 or 2 nucleoside substitutions, additions, or deletions.

48. The pharmaceutical composition of any one of claims 1-29, wherein
(i) the sense strand comprises SEQ ID NO: 2629 or a nucleic acid sequence thereof having about 1 or 2 nucleoside substitutions, additions, or deletions, and the antisense strand comprises SEQ ID NO: 2630 or a nucleic acid sequence thereof having about 1 or 2 nucleoside substitutions, additions, or deletions;
(ii) the sense strand comprises SEQ ID NO: 5668 or a nucleic acid sequence thereof having about 1 or 2 nucleoside substitutions, additions, or deletions, and the antisense strand comprises SEQ ID NO: 5769 or a nucleic acid sequence thereof having about 1 or 2 nucleoside substitutions, additions, or deletions;
(iii) the sense strand comprises SEQ ID NO: 5870 or a nucleic acid sequence thereof having about 1 or 2 nucleoside substitutions, additions, or deletions, and the antisense strand comprises SEQ ID NO: 5971 or a nucleic acid sequence thereof having about 1 or 2 nucleoside substitutions, additions, or deletions;
(iv) the sense strand comprises SEQ ID NO: 5566 or a nucleic acid sequence thereof having about 1 or 2 nucleoside substitutions, additions, or deletions, and the antisense strand comprises SEQ ID NO: 5567 or a nucleic acid sequence thereof having about 1 or 2 nucleoside substitutions, additions, or deletions; or
(v) the sense strand comprises SEQ ID NO: 5524 or a nucleic acid sequence thereof having about 1 or 2 nucleoside substitutions, additions, or deletions, and the antisense strand comprises SEQ ID NO: 5525 or a nucleic acid sequence thereof having about 1 or 2 nucleoside substitutions, additions, or deletions.

49. The pharmaceutical composition of any one of claims 1-29, wherein the sense strand comprises mUsmGsmGmUfGmUfCfGfAmGmAmGmAmUmCmAmCmUmAsmUsmU (SEQ ID NO: 5558), mUsmCsmGmAfGmAfGfAfUmCmAmCmUmGmAmAmAmUmAsmUsmU (SEQ ID NO: 5560), mCsmAsmGmGfUmUfUfGfCmCmAmCmUmUmUmGmUmCmAsmUsmU (SEQ ID NO: 5562), mGsmCsmAmCfCmUfUfUfUmCmAmUmGmGmUmCmUmCmAsmUsmU (SEQ ID NO: 5564), mAsmGsmCmUfGmGfAfGfCmCmUmUmCmCmUmAmAmCmAsmUsmU (SEQ ID NO: 5566), fUsmGsfGmUfGmUfCfGfAmGfAmGfAmUfCmAfCmUfAsmUsmU (SEQ ID NO: 5456), fUsmCsfGmAfGmAfGfAfUmCfAmCfUmGfAmAfAmUfAsmUsmU (SEQ ID NO: 5460), fCsmAsfGmGfUmUfUfGfCmCfAmCfUmUfUmGfUmCfAsmUsmU (SEQ ID NO: 5476), fGsmCsfAmCfCmUfUfUfUmCfAmUfGmGfUmCfUmCfAsmUsmU (SEQ ID NO: 5510), fAsmGsfCmUfGmGfAfGfCmCfUmUfCmCfUmAfAmCfAsmUsmU (SEQ ID NO: 5524), mUsmGsmGmUfGmUfCmGfAmGmAmGmAmUmCmAmCmUmAsmUsmU (SEQ ID NO: 6050), mUsmCsmGmAfGmAfGmAfUmCmAmCmUmGmAmAmAmUmAsmUsmU (SEQ ID NO: 6051), mCsmAsmGmGfUmUfUmGfCmCmAmCmUmUmUmGmUmCmAsmUsmU (SEQ ID NO: 6052), mGsmCsmAmCfCmUfUmUfUmCmAmUmGmGmUmCmUmCmAsmUsmU (SEQ ID NO: 6053), mAsmGsmCmUfGmGfAmGfCmCmUmUmCmCmUmAmAmCmAsmUsmU (SEQ ID NO: 6054), fUsmGsfGmUfGmUfCfGfAmGfAmGfAmUfCmAfCmUfAsmUsmUNNN-lipid (SEQ ID NO: 6055), fUsmCsfGmAfGmAfGfAfUmCfAmCfUmGfAmAfAmUfAsmUsmUNNN-lipid (SEQ ID NO: 6056), fCsmAsfGmGfUmUfUfGfCmCfAmCfUmUfUmGfUmCfAsmUsmUNNN-lipid (SEQ ID NO: 6057), fGsmCsfAmCfCmUfUfUfUmCfAmUfGmGfUmCfUmCfAsmUsmUNNN-lipid (SEQ ID NO: 6058), fAsmGsfCmUfGmGfAfGfCmCfUmUfCmCfUmAfAmCfAsmUsmUNNN-lipid (SEQ ID NO: 6059), mUsmGsmGmUfGmUfCfGfAmGmAmGmAmUmCmAmCmUmAsmUsmUNNN-lipid (SEQ ID NO: 6060), mUsmCsmGmAfGmAfGfAfUmCmAmCmUmGmAmAmAmUmAsmUsmUNNN-lipid (SEQ ID NO: 6061), mCsmAsmGmGfUmUfUfGfCmCmAmCmUmUmUmGmUmCmAsmUsmUNNN-lipid (SEQ ID NO: 6062), mGsmCsmAmCfCmUfUfUfUmCmAmUmGmGmUmCmUmCmAsmUsmUNNN-lipid (SEQ ID NO: 6063), or mAsmGsmCmUfGmGfAfGfCmCmUmUmCmCmUmAmAmCmAsmUsmUNNN-lipid (SEQ ID NO: 6064), or any combination thereof.

50. The pharmaceutical composition of any one of claims 1-30, wherein the antisense strand comprises mUsfAsmGmUmGfAmUmCmUmCmUmCmGfAmCfAmCmCmAsmUsmU (SEQ ID NO: 5559), mUsfAsmUmUmUfCmAmGmUmGmAmUmCfUmCfUmCmGmAsmUsmU (SEQ ID NO: 5561), mUsfGsmAmCmAfAmAmGmUmGmGmCmAfAmAfCmCmUmGsmUsmU (SEQ ID NO: 5563), mUsfGsmAmGmAfCmCmAmUmGmAmAmAfAmGfGmUmGmCsmUsmU (SEQ ID NO: 5565), mUsfGsmUmUmAfGmGmAmAmGmGmCmUfCmCfAmGmCmUsmUsmU (SEQ ID NO: 5567), mUsfAsmGfUmGfAmUfCmUfCmUmCmGfAmCfAmCfCmAsmUsmU (SEQ ID NO: 5457), mUsfAsmUfUmUfCmAfGmUfGmAmUmCfUmCfUmCfGmAsmUsmU (SEQ ID NO: 5461), mUsfGsmAfCmAfAmAfGmUfGmGmCmAfAmAfCmCfUmGsmUsmU (SEQ ID NO: 5477), mUsfGsmAfGmAfCmCfAmUfGmAmAmAfAmGfGmUfGmCsmUsmU (SEQ ID NO: 5511), mUsfGsmUfUmAfGmGfAmAfGmGmCmUfCmCfAmGfCmUsmUsmU (SEQ ID NO: 5525), mUsfAsmGmUmGfAmUfCfUmCmUmCmGfAmCfAmCmCmAsmUsmU (SEQ ID NO: 6065), mUsfAsmUmUmUfCmAfGfUmGmAmUmCfUmCfUmCmGmAsmUsmU (SEQ ID NO: 6066), mUsfGsmAmCmAfAmAfGfUmGmGmCmAfAmAfCmCmUmGsmUsmU (SEQ ID NO: 6067), mUsfGsmAmGmAfCmCfAfUmGmAmAmAfAmGfGmUmGmCsmUsmU (SEQ ID NO: 6068), mUsfGsmUmUmAfGmGfAfAmGmGmCmUfCmCfAmGmCmUsmUsmU (SEQ ID NO: 6069), mUsfAsmGfUmGfAmUmCmUmCmUmCmGfAmCfAmCmCmAsmUsmU (SEQ ID NO: 6070), mUsfAsmUfUmUfCmAmGmUmGmAmUmCfUmCfUmCmGmAsmUsmU (SEQ ID NO: 6071), mUsfGsmAfCmAfAmAmGmUmGmGmCmAfAmAfCmCmUmGsmUsmU (SEQ ID NO: 6072), mUsfGsmAfGmAfCmCmAmUmGmAmAmAfAmGfGmUmGmCsmUsmU (SEQ ID NO: 6073), or mUsfGsmUfUmAfGmGmAmAmGmGmCmUfCmCfAmGmCmUsmUsmU (SEQ ID NO: 6074), or any combination thereof.

51. The pharmaceutical composition of any one of claims 1-29, wherein the sense strand or antisense strand comprises one or more sequences selected from SEQ ID NOS: 1-5349, 5366-5971, 6000-6038, 6050-6074, or a nucleic acid sequence thereof having about 1 or 2 nucleoside substitutions, additions, or deletions.

52. The pharmaceutical composition of any one of claims 1-29, wherein the sense strand or antisense strand comprises one or more sequences comprising the first 19 nucleobases of a sequence selected from SEQ ID NOS: 1-5349, 5366-5971, 6000-6038, 6050-6074, or a nucleic acid sequence thereof having about 1 or 2 nucleoside substitutions, additions, or deletions.

53. A pharmaceutical composition comprising a nucleic acid sequence comprising Formula IA: 5′ Z1-U-Z2-G-Z3-U-C-Z4-A-U-U-Z5-L 3′
wherein
Z1 is 0, 3, 5, 11, or 13 nucleosides;
Z2 is 1 nucleoside;
Z3 is 0, 2, 5, 8, or 10 nucleosides;
Z4 is 0, 2, 3, 5, 8, or 11 nucleosides;
Z5 is 0 or 3 nucleosides;
each “-” is independently a phosphodiester or modified internucleoside linkage; and
L is an optional lipid;
wherein the nucleic acid comprises a modified nucleoside and/or modified internucleoside linkage.

54. The pharmaceutical composition of claim 53, wherein Z1 comprises 0 nucleosides or UGGUG, CAGGU, CAGGUUUGCCACU (SEQ ID NO: 6007), GCACCUUUUCA (SEQ ID NO: 6008), or AGC; Z2 comprises C, G, or U; Z3 comprises 0 nucleosides or UG, UGUCGAGAGA (SEQ ID NO: 6009), AGAGA, AGAGA, CCACUUUG, or AGCCU; Z4 comprises 0 nucleosides or GAGAGAUCACU (SEQ ID NO: 6010), ACU, ACUGAAAU, UC, or CUAAC; and Z5 comprises 0 nucleosides or UUU, UUC, UUA, UUG, CUU, CUC, CUA, CUG, AUU, AUC, AUA, AUG, GUU, GUC, GUA, GUG, UCU, UCC, UCA, UCG, CCU, CCC, CCA, CCG, ACU, ACC, ACA, ACG, GCU, GCC, GCA, GCG, UAU, UAC, UAA, UAG, CAU, CAC, CAA, CAG, AAU, AAC, AAA, AAG, GAU, GAC, GAA, GAG, UGU, UGC, UGA, UGG, CGU, CGC, CGA, CGG, AGU, AGC, AGA, AGG, GGU, GGC, GGA, or GGG.

55. A pharmaceutical composition comprising a nucleic acid sequence comprising Formula IB: 5′ U-Z6-G-A-Z7-C-Z8-A-Z9-U-U 3′
wherein
Z6 represents 0, 2, 3, 5, 8, or 11 nucleosides;
Z7 represents 0, 2, 5, 8, or 10 nucleosides;
Z8 represents 1 nucleoside;
Z9 represents 0, 3, 5, 11, or 13 nucleosides; and
each “-” is independently a phosphodiester or modified internucleoside linkage.

56. The pharmaceutical composition of claim 53 or claim 54, wherein the nucleic acid sequence comprising Formula IA is a sense strand, and the pharmaceutical composition further comprises an anti-sense strand comprising Formula IB: 5′ U-Z6-G-A-Z7-C-Z8-A-Z9-U-U 3′
wherein
Z6 represents 0, 2, 3, 5, 8, or 11 nucleosides;
Z7 represents 0, 2, 5, 8, or 10 nucleosides;
Z8 represents 1 nucleoside;
Z9 represents 0, 3, 5, 11, or 13 nucleosides; and
each “-” is independently a phosphodiester or modified internucleoside linkage.

57. The pharmaceutical composition of claim 55 or claim 56, wherein Z6 is 0 nucleosides or AGU, AGUGAUCUCUC (SEQ ID NO: 6016), AUUUCAGU, GA, or GUUAG; Z7 is 0 nucleosides or UCUCU, CA, UCUCU, CAAAGUGG, GA, or AGGCU; Z8 is C, G, or A; and Z9 is CACCA, AGUGGCAAACCUG (SEQ ID NO: 6017), ACCUG, UGAAAAGGUGC (SESQ ID NO: 6018), or GCU.

58. A pharmaceutical composition comprising a sense strand and an antisense strand, wherein
(i) the sense strand comprises SEQ ID NO: 3027 or a nucleic acid sequence thereof having about 1 or 2 nucleoside substitutions, additions, or deletions, and the antisense strand comprises SEQ ID NO: 3028 or a nucleic acid sequence thereof having about 1 or 2 nucleoside substitutions, additions, or deletions;
(ii) the sense strand comprises SEQ ID NO: 5664 or a nucleic acid sequence thereof having about 1 or 2 nucleoside substitutions, additions, or deletions, and the antisense strand comprises SEQ ID NO: 5765 or a nucleic acid sequence thereof having about 1 or 2 nucleoside substitutions, additions, or deletions;
(iii) the sense strand comprises SEQ ID NO: 5866 or a nucleic acid sequence thereof having about 1 or 2 nucleoside substitutions, additions, or deletions, and the antisense strand comprises SEQ ID NO: 5967 or a nucleic acid sequence thereof having about 1 or 2 nucleoside substitutions, additions, or deletions;
(iv) the sense strand comprises SEQ ID NO: 5558 or a nucleic acid sequence thereof having about 1 or 2 nucleoside substitutions, additions, or deletions, and the antisense strand comprises SEQ ID NO: 5559 or a nucleic acid sequence thereof having about 1 or 2 nucleoside substitutions, additions, or deletions; or
(v) the sense strand comprises SEQ ID NO: 5456 or a nucleic acid sequence thereof having about 1 or 2 nucleoside substitutions, additions, or deletions, and the antisense strand comprises SEQ ID NO: 5457 or a nucleic acid sequence thereof having about 1 or 2 nucleoside substitutions, additions, or deletions.

59. A pharmaceutical composition comprising a sense strand and an antisense strand, wherein
(i) the sense strand comprises SEQ ID NO: 3037 or a nucleic acid sequence thereof having about 1 or 2 nucleoside substitutions, additions, or deletions, and the antisense strand comprises SEQ ID NO: 3038 or a nucleic acid sequence thereof having about 1 or 2 nucleoside substitutions, additions, or deletions;
(ii) the sense strand comprises SEQ ID NO: 5665 or a nucleic acid sequence thereof having about 1 or 2 nucleoside substitutions, additions, or deletions, and the antisense strand comprises SEQ ID NO: 5766 or a nucleic acid sequence thereof having about 1 or 2 nucleoside substitutions, additions, or deletions;
(iii) the sense strand comprises SEQ ID NO: 5867 or a nucleic acid sequence thereof having about 1 or 2 nucleoside substitutions, additions, or deletions, and the antisense strand comprises SEQ ID NO: 5968 or a nucleic acid sequence thereof having about 1 or 2 nucleoside substitutions, additions, or deletions;
(iv) the sense strand comprises SEQ ID NO: 5560 or a nucleic acid sequence thereof having about 1 or 2 nucleoside substitutions, additions, or deletions, and the antisense strand comprises SEQ ID NO: 5561 or a nucleic acid sequence thereof having about 1 or 2 nucleoside substitutions, additions, or deletions; or
(v) the sense strand comprises SEQ ID NO: 5460 or a nucleic acid sequence thereof having about 1 or 2 nucleoside substitutions, additions, or deletions, and the antisense strand comprises SEQ ID NO: 5461 or a nucleic acid sequence thereof having about 1 or 2 nucleoside substitutions, additions, or deletions.

60. A pharmaceutical composition comprising a sense strand and an antisense strand, wherein
(i) the sense strand comprises SEQ ID NO: 3183 or a nucleic acid sequence thereof having about 1 or 2 nucleoside substitutions, additions, or deletions, and the antisense strand comprises SEQ ID NO: 3184 or a nucleic acid sequence thereof having about 1 or 2 nucleoside substitutions, additions, or deletions;
(ii) the sense strand comprises SEQ ID NO: 5666 or a nucleic acid sequence thereof having about 1 or 2 nucleoside substitutions, additions, or deletions, and the antisense strand comprises SEQ ID NO: 5767 or a nucleic acid sequence thereof having about 1 or 2 nucleoside substitutions, additions, or deletions;
(iii) the sense strand comprises SEQ ID NO: 5868 or a nucleic acid sequence thereof having about 1 or 2 nucleoside substitutions, additions, or deletions, and the antisense strand comprises SEQ ID NO: 5969 or a nucleic acid sequence thereof having about 1 or 2 nucleoside substitutions, additions, or deletions;
(iv) or the sense strand comprises SEQ ID NO: 5562 or a nucleic acid sequence thereof having about 1 or 2 nucleoside substitutions, additions, or deletions, and the antisense strand comprises SEQ ID NO: 5563 or a nucleic acid sequence thereof having about 1 or 2 nucleoside substitutions, additions, or deletions; or
(v) the sense strand comprises SEQ ID NO: 5476 or a nucleic acid sequence thereof having about 1 or 2 nucleoside substitutions, additions, or deletions, and the antisense strand comprises SEQ ID NO: 5477 or a nucleic acid sequence thereof having about 1 or 2 nucleoside substitutions, additions, or deletions.

61. A pharmaceutical composition comprising a sense strand and an antisense strand, wherein
(i) the sense strand comprises SEQ ID NO: 4265 or a nucleic acid sequence thereof having about 1 or 2 nucleoside substitutions, additions, or deletions, and the antisense strand comprises SEQ ID NO: 4266 or a nucleic acid sequence thereof having about 1 or 2 nucleoside substitutions, additions, or deletions;
(ii) the sense strand comprises SEQ ID NO: 5667 or a nucleic acid sequence thereof having about 1 or 2 nucleoside substitutions, additions, or deletions, and the antisense strand comprises SEQ ID NO: 5768 or a nucleic acid sequence thereof having about 1 or 2 nucleoside substitutions, additions, or deletions;
(iii) the sense strand comprises SEQ ID NO: 5869 or a nucleic acid sequence thereof having about 1 or 2 nucleoside substitutions, additions, or deletions, and the antisense strand comprises SEQ ID NO: 5970 or a nucleic acid sequence thereof having about 1 or 2 nucleoside substitutions, additions, or deletions;
(iv) the sense strand comprises SEQ ID NO: 5564 or a nucleic acid sequence thereof having about 1 or 2 nucleoside substitutions, additions, or deletions, and the antisense strand comprises SEQ ID NO: 5565 or a nucleic acid sequence thereof having about 1 or 2 nucleoside substitutions, additions, or deletions; or
(v) the sense strand comprises SEQ ID NO: 5510 or a nucleic acid sequence thereof having about 1 or 2 nucleoside substitutions, additions, or deletions, and the antisense strand comprises SEQ ID NO: 5511 or a nucleic acid sequence thereof having about 1 or 2 nucleoside substitutions, additions, or deletions.

62. A pharmaceutical composition comprising a sense strand and an antisense strand, wherein
(i) the sense strand comprises SEQ ID NO: 2629 or a nucleic acid sequence thereof having about 1 or 2 nucleoside substitutions, additions, or deletions, and the antisense strand comprises SEQ ID NO: 2630 or a nucleic acid sequence thereof having about 1 or 2 nucleoside substitutions, additions, or deletions;
(ii) the sense strand comprises SEQ ID NO: 5668 or a nucleic acid sequence thereof having about 1 or 2 nucleoside substitutions, additions, or deletions, and the antisense strand comprises SEQ ID NO: 5769 or a nucleic acid sequence thereof having about 1 or 2 nucleoside substitutions, additions, or deletions;
(iii) the sense strand comprises SEQ ID NO: 5870 or a nucleic acid sequence thereof having about 1 or 2 nucleoside substitutions, additions, or deletions, and the antisense strand comprises SEQ ID NO: 5971 or a nucleic acid sequence thereof having about 1 or 2 nucleoside substitutions, additions, or deletions;
(iv) the sense strand comprises SEQ ID NO: 5566 or a nucleic acid sequence thereof having about 1 or 2 nucleoside substitutions, additions, or deletions, and the antisense strand comprises SEQ ID NO: 5567 or a nucleic acid sequence thereof having about 1 or 2 nucleoside substitutions, additions, or deletions; or
(v) the sense strand comprises SEQ ID NO: 5524 or a nucleic acid sequence thereof having about 1 or 2 nucleoside substitutions, additions, or deletions, and the antisense strand comprises SEQ ID NO: 5525 or a nucleic acid sequence thereof having about 1 or 2 nucleoside substitutions, additions, or deletions.

63. A pharmaceutical composition comprising a sense strand and an antisense strand, wherein the sense strand or antisense strand comprises one or more sequences selected from SEQ ID NOS: 1-5349, 5366-5971, 6000-6038, 6050-6074; or a nucleic acid sequence thereof having about 1 or 2 nucleoside substitutions, additions, or deletions.

64. The pharmaceutical composition of claim 63, wherein the sense strand comprises SEQ ID NO: 5866.

65. The pharmaceutical composition of claim 63, wherein the sense strand comprises SEQ ID NO: 5867.

66. The pharmaceutical composition of claim 63, wherein the sense strand comprises SEQ ID NO: 5868.

67. The pharmaceutical composition of claim 63, wherein the sense strand comprises SEQ ID NO: 5869.

68. The pharmaceutical composition of claim 63, wherein the sense strand comprises SEQ ID NO: 5870.

69. The pharmaceutical composition of any one of claims 63-68, wherein the antisense strand comprises SEQ ID NO: 5967.

70. The pharmaceutical composition of any one of claims 63-68, wherein the antisense strand comprises SEQ ID NO: 5968.

71. The pharmaceutical composition of any one of claims 63-68, wherein the antisense strand comprises SEQ ID NO: 5969.

72. The pharmaceutical composition of any one of claims 63-68, wherein the antisense strand comprises SEQ ID NO: 5970.

73. The pharmaceutical composition of any one of claims 63-68, wherein the antisense strand comprises SEQ ID NO: 5971.

74. The pharmaceutical composition of any one of claims 63-73, wherein the sense strand comprises pattern 1S.

75. The pharmaceutical composition of any one of claims 63-73, wherein the sense strand comprises pattern 2S.

76. The pharmaceutical composition of any one of claims 63-73, wherein the sense strand comprises pattern 3S.

77. The pharmaceutical composition of any one of claims 63-73, wherein the sense strand comprises pattern 4S.

78. The pharmaceutical composition of any one of claims 63-73, wherein the sense strand comprises pattern 5S.

79. The pharmaceutical composition of any one of claims 63-78, wherein the antisense strand comprises pattern 1AS.

80. The pharmaceutical composition of any one of claims 63-78, wherein the antisense strand comprises pattern 2AS.

81. The pharmaceutical composition of any one of claims 63-78, wherein the antisense strand comprises pattern 3AS.

82. The pharmaceutical composition of any one of claims 63-78, wherein the antisense strand comprises pattern 4AS.

83. A pharmaceutical composition comprising a sense strand and an antisense strand, wherein the sense strand or antisense strand comprises one or more sequences comprising the first 19 nucleobases of a sequence selected from SEQ ID NOS: 1-5349, 5366-5971, 6000-6038, 6050-6074; or a nucleic acid sequence thereof having about 1 or 2 nucleoside substitutions, additions, or deletions.

84. The pharmaceutical composition of any one of claims 58-83, comprising a pharmaceutically acceptable carrier.

85. The pharmaceutical composition of any one claims 58-84, comprising a modified internucleoside linkage.

86. The pharmaceutical composition of claim 85, wherein the modified internucleoside linkage comprises alkylphosphonate, phosphorothioate, methylphosphonate, phosphorodithioate, alkylphosphonothioate, phosphoramidate, carbamate, carbonate, phosphate triester, acetamidate, or carboxymethyl ester, or a combination thereof.

87. The pharmaceutical composition of claim 86, wherein the modified internucleoside linkage comprises one or more phosphorothioate linkages.

88. The pharmaceutical composition of any one of claims 58-87, comprising a modified nucleoside.

89. The pharmaceutical composition of claim 88, wherein the modified nucleoside comprises a locked nucleic acid (LNA), hexitol nucleic acid (HLA), cyclohexene nucleic acid (CeNA), 2′-methoxyethyl, 2′-O-alkyl, 2′-O-allyl, 2′-O-allyl, 2′-fluoro, or 2′-deoxy, or a combination thereof.

90. The pharmaceutical composition of claim 88 or claim 89, wherein the modified nucleoside comprises a 2′-O-methyl nucleoside, 2′-deoxyfluoro nucleoside, 2′-O—N-methylacetamido (2′-O-NMA) nucleoside, a 2′-O-dimethylaminoethoxyethyl (2′-O-DMAEOE) nucleoside, 2′-O-aminopropyl (2′-O-AP) nucleoside, or 2′-ara-F, or a combination thereof.

91. The pharmaceutical composition of any one of claims 88-90, wherein the modified nucleoside comprises one or more 2′fluoro modified nucleosides.

92. The pharmaceutical composition of any one of claims 88-91, wherein the modified nucleoside comprises a 2′ O-alkyl modified nucleoside.

93. The pharmaceutical composition of any one of claims 88-92, comprising a ribose.

94. The pharmaceutical composition of any one of claims 88-93, further comprising a lipid.

95. The pharmaceutical composition of claim 94, wherein the lipid comprises cholesterol, myristoyl, palmitoyl, stearoyl, lithocholoyl, docosanoyl, docosahexaenoyl, myristyl, palmityl stearyl, or a-tocopherol, or a combination thereof.

96. The pharmaceutical composition of any one of claims 58-95, wherein the sense strand and the antisense strand form a double-stranded RNA duplex.

97. The pharmaceutical composition of claim 96, wherein the first base pair of the double-stranded RNA duplex is an AU base pair.

98. A method of treating one or more disorders of the upper and lower airway in a patient in need thereof, the method comprising administering to the patient a pharmaceutical composition of any one of claims 1-97.

99. The method of claim 98, wherein the one or more disorders of the upper and lower airways comprises nasal polyposis, chronic sinusitis, allergic rhinitis, or NSAID-exacerbated respiratory disease, or a combination thereof.

100. The method of claim 98 or claim 99, wherein the siRNA is administered in an effective amount to reduce eosinophil count in the patient.

101. The method of claim 99 or claim 100, wherein the siRNA is administered in an effective amount to reduce number and/or size of nasal polyps in the patient.

102. The method of claim 99 or claim 100, wherein the siRNA is administered in an effective amount to increase nasal inspiratory peak in the patient.

103. The method of claim 99 or claim 100, wherein the siRNA is administered in an effective amount to reduce airway symptoms in the patient.
